United States Patent Application Publication US 2025/0051766 A1 - sequence listing, part 23

SEQ ID NO: 5065 - DNA, 58617616 bp, Homo sapiens (residues 45,591,484-47,762,506 of 58,617,616)
  source 1..58617616: mol_type = genomic DNA
aggcgggcgaagcggagtgggtgggccacagccaggtagcggtccaccgagatgcagcacaggaaggcgatgctgatgtagatattggtgtagaagatgaacccaaagagcttgcaggacccggggccgtggatccagttgtcgtggtgcaggaagtagtccacccacagcggcagcgtgcagatgtacagcaggtcggcgatgctgaggttcatcaggtagacgcccagctcgttgcgctgttgcacctggcggtaggccgcccacagagccaggcagttggtgggcagccccacgccgatgacaaagatgtagagggatggcggaaagaggtggtccacgcgcgagtccacgtggcagccctcccacgtgtggttgcccatggtgggcacttcggcttctggggcgcttcccctggcccacgggggctgtggggccacagggagcgggaggccatggggccccctgagccccttccttggaggctcaggggaacatggtgggatgtggtctacagggaagagatgaggttgggtaggctgggctgggctgggaagggcagagcttgagagggaaaagttggaggagggatggaattatgacaggagggaagtctggaggatggtgagattaataaagaggtttttcaaggaggttatgtatggagtcagtgtgtcaacgagggagtatgggggtgacacaaaaattggtctccgggagtgtttatggaggagacgaaagcatcgctgggcaatggtgagaaggagatggtttgcagggcaattaggaagtatgtgtagccatattgaagtaataatggcgggggaatgttctagaagacacaagaaatacatgagaaagtgttgagataggacacagcgcagttagggagtgttggaaagttcaggcaatgtgggtgggagtgctggcatttcctaggaccccagaaagcaacagagataagtaaggtcaccagtaaggagaaggttctggaaaaggaggtgtctggcacagggtggacaaagataaaaggctcggtctgtggacggcaggaaggagtcttaggaaacaggaaggaggtgagtaaggtctagatcagaggtaagtttggggacggaagggaaatttcaatgggggcaggggagggactccagactggtcctggtgggggctgagggattgggatgaagtcagttcaccgctgactgcagtgcctgttgggagagaggacagcagtgagggagtcatggacactccaaccttcttctccccacactcctcaccataattgctgtgaactgcagagactggacaccccaacaatgcctacttcagccccatcctaagcaaccactctctgaaaacacagatttgaggtgtcaggcatattttcccctgacagatattagaataaagacccaactcaggccgggtgcagtggctcatgcctgtaatctcaacactttgggaggccgaggtgggaggttcgcttgagcctaggagttcaagaccagcctgggcaatgcagtgagacccagtctctacaaaaaataaaaataaaaatattagccaggtgtggtggtacatacctgtagtcacagctactggggaggctgaggtaggaggatcacttgatcccaggggattcaggctgtagtgagctataatcacaccacggcactccagcttgggcaacagagtgagaccctgtctcaaaaaaaaaaaaaaaaaaaaaggtagggtgtggtggctcgcacctgtaatcccagaactttgggaggccgaggcaggcagatcacgaggtcaggagttcaagaacagcctggccaacatggtgaaaccccatctctactaaaaatacaaaaattagctggatgtggtggcacgtgcctgtaatcccagctacacaggaggctgaggcaggagaattgcttgaaaccaaaaggcggaggttgcagtgagctgagatcgcaccactgcactccagcctgggcaaaagagtaaaactctgtctcaaaaaaaaaagaagaaaagaaaaaaaagaaaaaaaaaaggaaagaaagaaagagaaaaagggaaaaaaatgacccaactcagattttagcattttcctgcagaattcctgtaaaactggcacaggtatcatatcatgcttcaggaaatgccagactagtctaactctatcatgtcacagacagggagaaggggcccagagaggctgagtcacctccctaaggatgcacagcatggcagcaatagggccagggctggggccagcctcccactccttacccaagaatcccattcttgtcaacaaggataataacagcaaacgttaattgagccctactacatagcagatcccattccaggcatttttatgcatattatttctttttatttatttattttttgagacagggtcttgctcttttgtccagactagaatgcagtagcacgatcacagctcacagcagcctcaacctcctgggcttccagtgatcctcctgcctcagcctcccaagtagctgggaacacaggcatgcaccaccatgcctggcttaaaaaaaaaaaaaaaaaatatatatatatatatatatatatatatataaaatagatgcaggtcttcctgtgttgcccaggctggtctcttgaactcctgagctcaagagatccttccctgtaatcgcagcactttgggaggctgaggcgggcggatcatgaggtcaagagatcaaaaccatcctggccaaaatggtgaaaccctgtctctactaaaaatacaaaaattagctgggcatggtggcgcacacctgtagtcccagctactcaggaggctgaggcaggataatcgcttgaacctgggaggcgaaggttgcagtgagctgagatcacgccattgcactccagcgggggtgacagagccagactccgtctcaaaaaaaaaaaaaaaaaaaaagagatcctcccaccttggcctcccaaaatgctaggattataggagtgagccaccatgcccggccaatttatggatattacttctttgaaattttcaagactcctatgaggaaagtagttgttctttctctttgacaaactgaggcacagagctgttccaagacctgtccaaggtcctgatgtctagagtgcagccatctctgctctcagtcctcatctccagcctgtgcttcagtttccaccccagaataactggacaggccaggcacagtggctcatgcctgtaatcccagcactttgggaggccaaggcgggaggatcgcctgaggtcaggagttcaagatcagcctggccaacatggtgaaaccctgtctctactaaaaatacaaaaattagctgggcgtggtggcacatacctgtaatcccagctactcgggatgctgaggcgagaggattgcttgagcccaggaggcagaggttgcagtgagctgagatagcatcactgcactccagcctgggagacaagagaggaactccatctcaaaaaaaagaagtccaggcacggtggctcacgcctgtaatcccagcactttgggaggccaaggcgggaggatcacctgaggtcgggagttcgagaccagcctgaccaacatggagaagccctgtctctactaaaaatacaaaataagctaggtgtggcggcacatgcctgtaatcccagctacttgggaggctgaggtgggagaattgcttgaacccgggaggcagaggttgcagtgagctgagatggtgccattgcactacagcctgggcaacaagagcgaactccatctctaaataaataaataaataaataaataaataaataaataaataaaaaataactggacagaaaagggccctgggctgccagtggggactgggaaccaaagctgcagaggagtaagggaaaggggagagccaggagctgctgggaacagtcaaggtcaagatcaagatcagggagcatggggaagccctggggttagcgccagcagtctcctccctcagggaccactctcttcactgtctctgccctttcccccgcaattttcctgagtgagaaccttgagcctgtcacccactttgttctgggaagatctgcatacacagggcaaaggatattcatggaccaagcccctgactatcatcaaccccgcagagaagcagagccaagtccagagtcacaggcagcttcaggagccattccatccaggggtcttttggtttagttcttttggacgtgaaacctggctttttttttttttcccccaacaagatcttaaccagaaaccaatctaaaacagtgaaaagggtgagctgctagctgctctggtgaaacaaggtgggggtggagaggccacctctgaagaatccccaggatgcacttttaaaacatgttaaaaatggagtttaaggtggagtctattgacaaatgaggaaaccaatccccagagaggggacggaaggaggtccatgggagcctcccagatgccagagcatctttccatgggaaagtcctctgggctccacctccccagtgcttcctgaatctgtgtgcgtctctctcaaacgcctgccactgtccactctgcgtcagcatcagcgtcatcactcgctgggatcattgcagtagcatcaccattgcttttctgggctactctggcttccttcaaatcacttcccatatggcagccagaaagatctttcttttcttttcttctttttttttttttttttgagatggagagtttcactcttgtcacctaggctggagtgcaatgtcccaatcttggctcaccacaacctctacctcccgggttcaagtgattctcctgcctcttcctctggagtagctgggattacaggcatgcgtcaccacgctcagctaattttgtatttttagtagagacagggtttctccatgttggtgaggctggtctcgaactcctgacctcaggtgatccacccaccttggcctcccaaagtgctgggattacaggcgtgagccaccgcgcccgggcaagatctttctatcatgaaaatcagctctttcttttcttcttttcttttctttctttctttcttttttttgagacagggtctcactctgtcatgcagtagtgcaatcttgactcactgcagtcttgacctcatgggctcaagccatcctcccacctcagcctcgtaagtggctgggactacaggtgtgtgccaccacacctggctaatcgttctattttttgtggagatggggtttccccatgttgcccaggccggtctccaactcctgggctcaaaagatcttcctgccttggcctcccaaagtgctgggattacaggcatgagccaccacatgcagcctagttcttgttacttccctgcttgaaaccctccaatggcttctgaatggacttgcggtaaaatccagactcctcatccggagtcacaaggttctgtctgacctgctggggcagcctagccaatctcactcacctctccttcctgcctcagcagtctcaaggccagtgagtgaccttctttccagcctcaaacctttgcacacttaccatactctcagtctggaatgctcttttttttttttggagacagaatcttactctgtcgcccaggctggagtgcagtggcacgatctcggctcactgaaacctccgccacctgggttcaagtgagtctcctgccttggcttcctgagtagttgggattacaggtgtgcaccaccatgcccagctaatttttgtatttttagtagagatggggttttaccatgttggccaggttggtctcgaactcctgttctccagtgatccacccaccttggcctctcaaagtgctgggattacagatgtgagccactgctcttccttcagatagtctgagtagctccgttccctccttcacttcctcgggagtccctctccattcagtccccgactctcccctgccccaggaccctctcctcacatcaccctgttttgtttgtgtctgtctgcctagaataggttgtccaggagggcagagactttgtgtgccttgttgactgctgtatccccagcatccaggacaggcccagcatacagtaggtgctcaataaattaccaaggtcatggtcagggagcacagagccatttgccaatggcaaaaaccattccagaagctttgcagaggccagaggcatggagtaaaaacatactctctgcccatgaggctgccccaccccaccccaggctcaaacaagggcatggggaggagggggaagggagggagaggagtccattcccaggggaagaggtggtcaggggagagctggaaagggcaagatctatccgcttcttaattgactttgaaaggtcagggctgagtcgtgctcagtaagtcctgccccctgtggggtcctcagcggcagagctgcctcccccaccccagactcttgggcagaagcttgtgggtcctgtggagatgggatgggtgggggcgtactccaggctggaacagtgtgatccagtccctcccttccacttgaaacctcccacccagaccaagtcactcaaaataacctccctcccctctcctctgccctctctctccccatctctctgcccctagtctctcccttcctcctgtgacatttagagaattaggtctccaggagcctcagtttctcccttctgtaaaagggggcacaggctttatagtcatcacatcacagaccggaacgtccttgctagaatgcgatatcagctccgtaacatgcagtatttgaacgattattattattccacggggactagggggctgagacaagaaataaaccggttcttcatggcaggagacacccaccgagggctagaagtcccctttgccccactttctatcgacccccagggctctgctgacctaactcgggtacccgggcaggagacacttccggcagccagaggaggaaatacacttcccattgctaatttcctcaagggggaaccggtccagctctcacccctcctccctcccacccctcctccccaacctgctggcatcttgcggatgctggacatgggggggaggggtgcccagacagccctctcttcttccccacgtgagatctgcccaacgtggaaaccccaaaagtcagcatggaacgtcagactcttagaacgccacagtgcagccgacgtatgtgtggcagctgggagtgtgaggctatttctgaccccttcctggtacagatggggaaaccgaggcccgcagcagcaaggcagttgtctaagtcacttgatgtctcaagactgggcaaacctcctgtcgctgttaactaaacagcttcccttcccctgaggtttttctcttcactctctgaacttctgtaatttttctcaagtctttctgagcgtctctggcccctctgagaacctactagaagatacgaccttctccccacaaagaaagcaagcgaccttccatcacctgatccccataaccccgttccccttccaggaccctctctggttgggatctaagttctgccccttaggctctgttgagggggtaaacccccaaatctcacatccacaagaagctccccctgtctgtcccacaggcccccacttcttgggtccctgctggccccttccagagagtcggggggaagagaaatatacccaaggatggagagatggtggggggacaggaaagactaggaagacctggcccccccaactttagcagcctcggctgccgcatcctgccagccaccccaaaatccagcaaagctgaaaaacttggaggattttgaggacaagagggagaagtgctacagccccccgcatcccccagcacccctgggctcactcaccagccttgtccccgatgccaccaggctatctcacctcccccttttcctcctctgtgggctcctgctcccaccacccccccctccccgccttctccctgcagccccaagggaccagccagctccggtctgctcattagggacgaaatgtgatcactggtcctcgctccccacctggtgccctggcggccggcggaaaccagggggcaatcgggctaccctaacggccccactgcacctcagtatccctgtttcaaccgagagggtctctgtgcccccaaagcccacactgcctactagggataccagtccttagatggcctctctgacgttctaggtctctatggttctgcagtcttcaggttctatccttagttcacttcgcagttgaatgttctattataacattctagagcgttactcttctttcattctatttattacatcgtggctttgtaagtacctaccctaagtttccaatattctaggagtgtcacattccaagattcgaaagttctattgttagaacacgctatgatttttttaagcattctatgactttcataatctattattaaacgctcagtgatttttatctttccccagcaaacaggaatatgtatttcccttttctcttttacagaaatgggaacatacactaaatacggtgagccccacttccttttctttccccccttctctcgcctgcttttgaacattccagcagcctgatttctaagattgtgcagaattctaagaaattatggcttcatggagggaagagaggggcgtgttagtcaccacctccacctggcccctaaattctcaccacctgggggtgacatgctatatccaggccgcctctctaccctttcgctagtgggcctagcctcagccctccccgctcacaccagctgagttattatttgtctagacacaaaccaaattataggccctgtccccgagggaacggtgggctccaggcggagggtcaggagactgaagctggagttaatcccggttcccctccacctccctccctctcttcccgaaactccaccccttccacccaaaccaactattgcccctctccctccccaccaccatggttttggaaatattttctctcctctgcttctaaaaccctcccttctggattccagccatttctactcaccctggcatctctccctcctcattgagaagacctctttccccaaattaatccgacttagtggtagcagaagaagccagctctgtggatttgggcttcagttgaaaactggggtcccaaccctccagcctggcactgactcactgtggggacttctgcttttggacctcagtttctccatctataaaatgggggcagggggagttggcctaggtggctccgcaaaccctttccagctctcagctgccatcactgaaacgtgccaagatttcaacactcctctttttggattgaaggactccagtatccccaggacctttgattggaaagatctggaattcccaggcctcccctccaatgcttcttccatctgggcccttccattcaaagatgttcacattcaaggtacttgatcataggattcccagggttccaggagcccctatgggtctttcatcctcttcagctgggattcccccagaaaagaaaacctcctcatcctcaccccaaacctgaagtcaagttcatctacaaagacagaggtgggggcggatacccccttggtgggctcaggaggaggggggctgatggtgggctctggagggggaactggggggtgtggccccatcctctccacttctgcgccaaacaaattccccaatgcatatccagcctgagtacgcacacacacacatcccacaaccgatgcctcacagatatcctagagctattcctcagcctagtttgggaggaggggttgtccagttccaggggggagagtgaggcggaagcaggaaagagttaatggtgacccagccaaatcctggaagagaggaagtaggggaggaagtccaccccccaggcaggaattcctgaaattggcgggcgggctgggtgcgacctgaggggcagtggggtggctccgtgaagggggcgctgggatcatggtgtcacttagagtccgcctgccccaggtcacaagcctcctgccccctaccccactcccaagcaggttcccagcccagaggaaagttccgggatgcggaggatttggaaggagagaagacagagctgaaggtgccaaaacagtgttataagagacggagagaaagagacagggcaatagagatgaagagacaggaagggagagagcaaagagatacacagagacagggagagatggagatagagtcagagacatccgcagaggtcccacaacagacgggggtgaggcagaggcaggggcagagggaggtgggacccagaaacagagagacagagacagacagacggagacagagaggcagagatcaagaaaaagacagagacatccagagacacagaaggaaagacacgtccagaggcagagggaccacagacacagagacatcaggcgggagttggagacagacgcaaagccagggagagcaacagagggggcgggcaccgagacggcgcgggagactgaggcagcccccgagggggcggggaggagcggtctcgccacgagcagggcaacctagtgagaccccgcagcatcgcgggcagccggggaggacccggcacttacctgcgcgcggcgactggacggggcgggcggcggcacctctctccgctgcgtccaggtccccggtcttgacaacggcgcggggacccagcggatgcccccgcggggcagaacagcggctactcctcccggcccccgggccagagccgccagccgaggccccgccccggccaggcccgcccccattaaccccacctttgccgctgccccttaacccctttcaggcttcaccccattaaacgcctccagccacgggtgaggctcatctgctactggaacacccccgaatccttccaagtccccagctggaaggtcccctctctccaaccacacacccccaaatttatcaggtcctcggctatgggaagaggaggcccccgctactgaccttccctgggttaagccatttcctcccttagagaccccaggcttcagtcattcatcctctggtcattaaccttctgcatcttcctccccaacaacggagagaataaagggttctgttaggtccccaactccaaagtcagggccacccctagaaggagctctggggttgcatttccagcctgactcttggtcagaccttaggctagtgacatctccgtgcctcagtttcctctttgaatcaaggtggtcactcatggtgcctgcttgcttccttcttttctttgctttgctttgctttgcttttttctttcttttctttcgagacagagtcatgctctgttgcccagactggagtgcagtggcacaatcttggctcactgcaatctctgccttccaggttcaagcgattctcctgcctcagcctcccgagtagctgggattacaggcacacaccaccacgcccggctaatttttgtatttttaatagagacggggtttcaccaagttggccaggctggtctcgaactcctaagctccagctatctgcccacctcggcctccaaaaagtgttgggattacaggcgtgagccaccgtgccccaccttttttctttttttgagacaggttttcactctcttgcccagtctggagttcagtggcacgatcatggctccctgcggcctcaaccttccaggctcaagtgatcctcccacctcagcctcctgagttgctgggactacaggcgtgtgccaccacacctggccaatttaaaaaattttttttttctatagacaggggtctcactatgttgtctaggctggtctcaaactcctgggctcaagccatccttctgctttggcctcccaaagtgctgggattataagcctgagccaccgaggccggccatcatggtccttttctcctggcggtctcatttaatggtgtcaatgctatcaagtctgtaaaatatgccaaccagaccccaacactccccatctttctctgcctcacttttcccctaccctttggggaaggcaacattctcttatttttttctagttgtctgccttcctactaggaagagtgtcatttttgtgtctggcttgtttactgttgcatgtctgttgcctagaagactgctgggcaggtgataggtgtgaaacacattgttttctggccgagcgtggtggctcacgcctgtaatcccagcactttgggaggctgaggcaggcggatcacgaggtcaggagatggagaccatcctggctaacacagtgaaaccccatctctactaaaaatacaaaaaaattagccagatgtgatggtgggcgcctgttgtcccagctaatcaggaggctgaggcaggagaacggcatgaacccgggaggcggagcttgcagtgagccaagaccgcgccactgcactccagcctgggtgacagagcaagactccatctcaaaacaaaaaacaaaaaacattgttttcagggagtgaacaaatgaatgataagtgctcctaaaacattagcttatttttattattaacatcacatctttcataaactaatcatgagaattcattattggtcaagggacttcagatagatgtggcatataacactaaaaaatgatagctgtcaggtttgatttttttttttttttttgagacagagtcttgctgtgcccaggctggagtgcagggacatgatctcagctcaatacaacctcctcctgccgggtacaagcaattctcctgtctcagcctctggtagctgggtatacaggcatgcaccaccacacccagctaatttttttgtttttagtagagacagggtttcaccatgttggccaggctggtctcgaactcctgacctcaggtcatctgcctgccacggcctcccaaagtgctgggattacaggcatgagccacggcacctggcttgttttttgtttttttgagacagagtcttgctctgtcccccaggctggagtgccattgtgccatctcagttaactgcaacctccacctcccaggttcaagtgattatcctgcctcagcctcccgagtagctgggactacaggtgaacaccaccacacccggctactttttgtgtttttagtagagacaggttttcaccatgttggccaggctggtctcgaactcctgacctcaggtgatcagcctgcctaggtctcccaaagtgctgggattataggcatcagccatcgcgcccagctcttttgtgtttatttttaaattaaattaaaatgtaggccaggcatggtggttcatgcctgtaatcccatcactttaggaggccaaggcaggttgatcaattgaagccaggagtttgagatcaacctgggcaacatagcaagactctgtctctacaaaaaaaaaatttcttttaactagccagctgggtggtgcgtgcctgtggtcccagctactgcgcaggccaaggtgggaggatcacctgaacccaggaggcggaggttgcagtgcgccaagatcgcaccactgcactacagcctgggaaacagagggggaagaaagggcacctaagctctgtggctcatgcctgtaatcccagcactttgggaggctgaggcgggaggatcactcgagcccaggagtttgagaccagcctggacaaaaaagtgagacccccatctctacaaaaaaaaataaaaaataaaaattagccgtgattaaaaaataaatgtaattaaaaattacatttaattaacaattagtctcaaaaaatttgattaaaatgttcagatcttaagggaagaatataaggaatcctgaaaattggatacaccatgtaattaaacacccaaatcaagactcaggatatcggccaggtgcggtgtctcacacctgtaatcccagcactttgggaggctgaggtgggcagatcacttgaggtgaggagttcaagaccagactggccaacatggcgaaatcccgtctctactaaaaatacaaaaattagttgggtgtgatggtggatgtctgtaatcccagctactcggaaggctgaggcaggataattgcttgaacccaggaggtggaggttgcagtgagccgagattgcgccattgcactctagcctgggcgacagagcaagactccatctcaaaaaataaataaatagtgcaggtgcactggatcatgcctgtaatcccaacactttgggaggccaaggcaggcggatcacctgaggtcaagagttcaagactagcctgaccaacatgaagaaaccctgtctctactaaaaatacaaaattagccgggcgtggtgacacatgcctgtaaacacagctactcgggaggctgaggcagaagaatcacttgaacccaggaggtggaggttgcagtgacccaagatcgtgccattgcactctagtctgggcaacaagagcgaaactctgtctcaaaaataaataaattaattaattaataaaacaaacaaaaacatagctattcttataatcttgtgtggctttggacaggtgactttacctctgtgaaccacattacccccttcctctcagggatttttcttttaagagatggggtctcactcttttgtccaggctggagtacagtggctccatcataactcactgcagcctctacctctggggctcaagcaatcctcccgcctcagcctcccaaagcactgagattaccagagccaccaaacccagccaaagtgagcaggttaacgaagactcaagagaccaacaacactcataggaataaatgtttttttttttttttttttttttttttgagacagagtctcgctctgtcgccctggctggagtgcaatggtgcgatcttggctcactgcaagctccgcctcccaggttcacgccattctcctgcctcagcctcccgagtagctgggactacaggcgcccgccaccgcgcccagctaattttttgtattttttagtagagacagggtttcactgtgttctagatctcctgacctcgtaatccgctctcctcggcctcccaaagggctgggattacaggcgtgagccaccacgccaggccaggaataaatgtttttttccttcaggccgggcacagtggctcacgcctgtaatcccagccctttgggaggccgaggcaggtggattgcttgaggccaggagttcaagaccagcctggccaacatggcaaaaccccatctctactaaaaatacaaaaattagctgggcatggtagcgcacacctgcagccctagctactcgagaggctaagacatgagaatcgcttgagcctggcaggcagaggttgcagtgagctgggattgtgccactgcactccagcctgggcaacacagtgagactgactcaaaaactaataataataaaaagataaattctgaatgctcattggtgggcttagagtccccttctctctctggctcatcctaaatttatgctgagactcgatcagggtcctggagggaagcaagtggccactccgagtttaactgggagcatttatgggcagtttatagagggatgggcagagtggagaaagccacaaaggatggggcggccccaggggaccatccgaagtgggcacgaagccatcgccagcctagggcagaagggacagggagggagtctgttacccgtctccagggacagctcgagttcccagaggaactgcggctcagaggaggggaaccacagccactgtgagtgcgggatgcagggaggggcccaggaagcaaataccctgacctctctccaccgaccctgccgatagaatttgcacacggcggtctcccagggccccgagctggggaaggaaggctgagagtgaccctgggggcgcggaggagggtcacgtggagaatcaccagcacttttccagcagaactttcttggcacatttttccatgcaggtccaagactggccacgaggggtcgaaagagcacccggatgcccgatgaaagggccgcttccgcagcgctgggccactttcccagaacctgggcaatggggaagggacaaaaggtggggagtgaggggaggaggagaggaggctttgacccaagagcggcagaaaactgtcttctagacctaagggtgataggataggcctagtgcaaactccatccacagggtcggtggagagagtcagggtacactcacttcctgggcccctttctgcttcccttagtcccacagtggctgtggccccctcctctgaaccacagctcctctgggaactctgcctgtccctggagacgggtaacaaattccctccctgtcccttctgccctaagggtggtgatggcttgggtctcactggtctcctatctccagcataggtctggtcactgctggctgatgaggagttcgcccgtggacaagttcagaaagggagggttcaaatggctggcacctaagacaatgtgactgtagagggtgctggcttttaaaaaagtgaaggatcagccccggtgtggtggctcatgcctgtattcccagcactctgggaggctgaggcaggcagatcacctgaggtcaggagttcgagaccaacctggccaacatggcgaaactctttattaaaaaatacaggctgggcgcagtgggtcatgcttgtaatcccaacactttgggaggctgaggcgggcggatcacgaggtcaggagactgagaccattctacctaacacagtgaaaccccatctaaaaataccaaaaaaattagccgggcatggtggcaggtgcctgtagtctgagctactcgagaggctgaggcaggagaatggcatgaacccaggaggcggacctttcagtgagccgagatcgcaccagtgcactccagcctgggcgacagagtgagactccgtctaaaaaagaaaaaagaaaaaaaaatgcaaaaagtagccaggtgttgtggcatgcacctgcattcccagctactcaggaggctgaggcaggagaatcgcttaaacccgggaggcagaggtggcagtgaaccaagatcatggcactgcacccagcctgggcgacagagcgagacaccatctcaaataaaaaaaaaattttattttaatttttttgagacagagtctcactctgtcacccagactggagtgcagtggtatgatctcggctcactgcaacctctgcctcccaggttcaagccattctcctgcctcagcctcctgagtagctgggattacaggtgcccgccaccacacccggataattttttttgtattttttagtagggacagggtttcaccatgttggccaggctggtcttgaactcctaacttcaggtgatcaacctgcatcggcttcccagagtgctaggattacagatgtgagccaccgcacccagccagaaagttttattttaatctaagttagagcaagatggtttctgttgcttgcatccaatgaagacctaagtaacaatggtccctcatcataagcactgtgacacactgatctggtttggctgggtccccacccaaatctcatcttgaattcccaggcgttgtgggagggaactggtgggaggtaattaaatcacggggcaggtctttcccatgctgttcttgatagcgaatgagtctcacaagatctgatggttttcaaaagtggcgtttctctgcacaagctctcttctcttgtctgccaccatgtaagatgtgcctttcatcgtccaccatgattgtgaggcctccccagccacatggaaccataagtccaatagacctcttttttttttgtaaattgcccagtctcaggtatgtctttatcagcagcatgaaaacgggctaatacactaatacacacacacatccatacacatacacaactgtgtaggcacataccgtacaaatacatagaccctgacacaccttagtgtacgtgtctttatttctggatgatataaaagaaaaaacttaaaaaacaccccaaaccaaacaccaatggatccccaaagcgatgtgactccctcttcccacccggataaatagagacttctgtatgtcagtctaccctcccgcccccataaccccctctgctatagacatactctgggtatatattactctactcggcaatagacatctcccgaaaatagaattcctgccctgacacctgactcttccctggccgcatcagaccacccgccactgtagcacactggtgtccttgccccctgtggtcagggccatgctgtcatcccacaagaaggccacatttgtcacatggctgctgtgtccaccgtacttgtggctgagggcctgttacaaggaaagaagtaagtgaagaaatgtcagtggggacaatgccaccccatcatggtcctcttgtcttgacccggttcttttctgctcttcctctttttttttttttttaatcacttagagtgaagtcacttaggtatgagcacagcttcaatgcagccttgacctcctgggctgaagggatcctcccacctcagtctcccaagaagtagctgggatcacagatatgcgcccccacacctggctaattctttttccttttatagcaatggggtgtcccagtgttaccagggctaataagccctttgtttaagaaccaacagaggccaggcgtggtggctcacgcctgtaatcccagcactttgggaggccgaggcaggcggatcacaaggtcaggagatcaagaccatcctggccaatatggtgaaaccccgttctctactaaaaatataaaaattagctgggtgtggtggcgcatgcccgtaatccgagctacttcggaggctgaggcaggagaatcacttgaaccagggagtcggaggttgcagtgagccaagattgtgccactgcactccagcctggtgacagagtgagactctgtctcaaacaaaaaagaaccaacagaacagctgggcatggtggctcacgcctgtaatcccagcactttgggaggccgaggtgggggtggatcacttgaggtcaggagttcaagactagcctggccaacgtggtgaaaccccgtctctactaaaaatacaaaattaggcctggcgtggtggctcatgcttataatcccagcactttgggaggccaagttggggagatcacttgaggtcaggagttcgataccagcctggccaacgtggtaaaaccctgtctctactaaaaatacaaaaaaattagccgggcgtggtggcacacgcctgtagtcccagctatttgggaggctgaggcatgagaatcacttgaacccaggcagcggaggttgcagtgagccgagatcgtgccactgcactccagcccgggcgatagagggagactctgtcaaaaaaacaaaaacaaacaaaaaacccagcagggcaactgaattggtttattcagcaagttaatggcataaatagaagaaatagcatgcacgtggggaaggctattctacatgctgggatttgagacataagcaaatgtagtttggaccctggttcaaacaaaccaaccatagaaggccagtctggggcacatcagggaaatatgaatatgtactggctatgagatcatatttaggaattaacgttttgtttttgccttcctagggatgaggcatgtaagaaattaatgttgctgggcgtggtggctcacgcctataatcccagcactttgggaggccgaggcaggcagatcgcctgaggttgggggttcaagaccagcctgaccaatatggagaaaccctgtctctatttgaaaaatacaaaattagccgggcatggtggtgcatgcctgtaatcccagctactcaggaggctgagtcaggagaatcgcttgaacccaggaggcggaggttgcagtgagccaagatcgcgccattgcactgcagcctgggcaacaagagtgaaactctgtctcaaaaaaaaaaaagaagaagaaattaatgttaattaggagtggtcagaggcttgtggatatgtaacaattcttcttcttcttcttcttcttttgagacagaatctcgctcttttgcccaggctggagtgcagtggtgcaatctcaactcactgcaacctccgcctcccaagttcaagtgatcctcctgcctcagcctcctgagtagttgggatcacaggtgcccgccaccacccatgactaatttttttgcatttttagtaaagacggggtttcaccatgttggccaggctagtctcgaactgttgacctcaggtgatccgcctgcctcggcctcccaaagtgctgggattacaggcgtgagccaccgggcctggccagaattatccttatttttttaggcatgaatgctcaatttagagggctaaaagataacctatgcgttttcgtgtgtgtgggtttttttgtttttgtttttgttttatgacggagccttgctgtcgctcaggctggagtaaagtggcacgatctccgctcactacagcctctgcctcccgggttcaggcaattctcccgcctcaccttccccagtagctgggattacaggcgtgcaccaccaggcttggctaatttttgtatttttgtattcttttttttttttgagacaaagtctcactctatcgctcagtgcattgttgcttagtggagtgcagtggcgtgatcttggctcactgcaacctctacttcttgggttcaagcaattctcctgcctcagcctcctgtgtagctgggattacaggcgcctgccactacgccttgctaacttttgtatttttagtagagtcagggtttcaccatgttggtcaggctggtctcaaactcctgacctcaggtgatccatcaccttggtctcccaaaatgctgggattacaggcttgagccaccgcacccggccacatatgcagtttcttaaaactacagaccaggacaggtactgtggctcatgccttgtaatcccagcactttgggaaactaaggtggagaggattgctcaagcccaggagatcaagaccagcctgggcaacagagaacctatctctatgaaaaatacaaaaattggccaggtgtggtggtgcacgcctgtagtcccagctactcagaaggctgaggtgggcggaccgcttgagtccaggaggtcaaggctgcagtgagccgagattgtgccatgccactgcactccagcgtgggcaacagagtgagaccctgtctcaaaaataaaaaataaaaaaagaagagaaaggagaaagaagaaacaaatgaaataaatataccaaatctggtaatagttgaacatgggtaacaggtacaggaggagtcactgtactagtctttctgcttttatgcatgaaaatttcctaggaaaatgctgaaacaatccctcttctgttagaaccagagaatggtaaaattaacgtccagcttttttttttgtttttgtctttgttttgagacaaagtcttgctctgtcgcccaggctagagtacagtggtgcaatcatggctcactgcagcctcaacctcctgggctcaagcaatcctcccacctcagacttccttgtagctggaactacaggcatgcacaaccatgcccagctaattttgtgtgtattttgtagagatggggtctcactttgttgcccaggctggtcttgaactcctggcctcaagcaatcctcctgcctcagctttgcaaagtgttgcgattacaggtgtgagccactgcaactggccttggcctcccttaaaaactcataagatctggttgtatatcctgtgcctaggtacatagtaggtgctcaataaatatttactgagttaacaaggataaaagaaccaaagagctcagaattgcagttgctcagaacttcagagaaccaggtcttcaccatgacacactgaaattcatccaccttggggttaagaaaggcccttgggatcaagactactgtcctccttgtacagatggggaaaccgaggctcagagaaggggtggggttggaccagagctgcctgaattttgtccccacccctgcttgctacccccgtccatccccatctccccaagggactcactcgaggctgacagcaggggtagctaaacaggtgaactttgccaaagtcatcagctgaagccagcaacttcccatcatgagagcgggccacagcgttgatatcagtgccgtccgccccctcagaccagatccctgtgggcaagatgaagggaagtggtaagatgtcagctggagccagggaccgccaagaggagcagattgccactccagccaccttaatttgttccgacctagcctgtatctatccgaggatatgagtcagaattaccttaaaatgtgaatccgagcctgcccctgctctgcttaaaacccttccatggctccctggtgatcttagaagaaagcctgtggttctaaggctcagcaggccccatgcactgctccagcctcatccctcatcagtgctcctgttaaactctgtaatgatttggccaccctgcctccctgcatttctccaaatgccaagttctgtgtcacgcgtgggcttttgtatgtactattccctttgccaagagactgctttccttcttcactgccctggaaagtaactcctcatcctccaggtcctagctcagatgtctcttcctccaggaagccctccctgattccctccaagagtaggccagatgccccaccctgggtttccctgtctcagacctgctcactctgggtcatcactgtctggggacaagtctgcctcccccactggactgagagccacaggagagcagggccgtcagtcatggtcactgccaagcccacggcaggcacagaactgctcagggaatatgtgtttgcttcattcgtgcctgaatgaatgggtggctagggcaccggcagtgtggatctctcctggccagttaccacgcccatttggtttcattttattacagctctaatgagtcatctcaccctaccctttcctcttacacaaatacagcccacatgcagtaaagcagtgagcttcccacactggaggtaagcagtaagactctggaaaccaccagcggggatgtctctcagaactactgtcctcagtgagacctctctcattccagaactcaccaaacaccccaaaccctaggacacaagtagctgtggcccattccatgttcctcacagcatccgcactggtgatctgcttacaggtagccgggtcccctggggcagaaaatgggaggagacattcagagttggaagaactacccagtaaacccatccctttcttagacaatcggagctgaggtccaagacagaggaggctaaggtcccagggctcattctacctgtcaggactggctgagaaggcatcacatgctggggtcttcacagcccgcagcgtaagcaggagcatctacttttaaacccgcatctggccgggcatggtggctcacgtctgtaatcccaggaggcagcatgagccacagcatctggctggatcacctgaggtcaggagttcgagaccagcctggccaagatggtgaaaccccatctctactaaaaatacaaaaattagaccaggtgtggtggctcatgcctgtaatcccagcattttgggaagccaaggcaggcggatcacctgaggtcaggagtttaagaccaacctggtcaacatggcgaaaccctgtctctactaacaatattttaaaaattagctgggcgtggtggtggacacctggaatcccagctactcaggagcctgaggcaagagaatcgcttgaacctgggaggcggaggctgcagtgagccgacatcgtgccattgcactccagcctaggagacaagagggaaactcccatctcaaaaaaaaaaaaatacaaatacaaatattagccgggcatggtggtgtgctcctgtaatcccagctactcaggaggctgaggcagaagaatcacttgaacctgggaggcggagcttgcagtgagccgagatcgcgccactgcactccagcctgggggacagagcaagactccgtctcaaaataataataataataataataataataataataattaaaaatttaaaaatgtaaaaaaagaaacctgcatcctacccatccgaccggaaaggggaggagttgactaaaagtggggtataccagggagaaaatgagaagccagcggtccctaaattccaaatcagaaccagccttgaataccaagggagcgaggcttgaagcccctccctcccctcccagaactcagggaagtctgcaaatgagacggaggaagtaatgtctctgggtcccggagaactcacagtacagaatctcatagtccccggagttggtgacaaagcagctgctgtcctgggcccaatccaggtgggtgataaaactggaatggccctgcgggggagggaagggatggtgttagagctgcagagggcggaaccaaggagagggggacaggattaaatcaggaaagtggaagtcaaatacagaggtagggcgagaacacaaggggactaaaggaaggatacacaggcctttggagtatgggggcagggccagaatactgtgggcggggccagactgtgatgggcagggctagacaaaaagcacttagaacacaatgggagtttagaacaggtgggcagggctagacacggaggagctggctttgaatgttgaggggcggggctacacagaggggcggtctcggaacgtgaggggcggtctcggaacgtgaggggcggggctacacagatgggcttagcacgtgggggcggggctacacaaaggggcgggcttagaacacacgaggtggtgaatgtgtggacgtggccaagactccttgctctgatcagggcagaatcagttgagtgttgaagctgcgctcccttgaggtagaaaattggttaattttgcaccccctgggcggggtggcggcgcgggctgggggccactgcccactcaccgagcacttgcccaggcggctgaccttgcggccgccctggtccaccgtgtacacgtacaccaagttgtcgtgggagcccacggccaggtacgccccgtctgggggagggggaggggggctatgaggaggcacccaggctccatcccctcctcgcccagactcagccccctcaacagtccccagctccatccccactgcatccctcctaggcctcgcttcgcaggctccacccctccccctgccaagagctctgagcctctgtcccctggccctgccgcttgggtgtcccaggcctgccgcttacctggggagaagctgaccactgagatctgttcattgccgtctgtgtggatagccaccaggtcatgggtctccgtgtccagcagcagccatcttgaaggagagggcgtggtggggggaggaggggtgagctgatctgacagagagaggccgcaatctgtggggtctaagggagggatcagagggaccccagaagtgacctgggctgggcacggtggctcaggcctataatcccagcacgctgggaggccgaggcgggtggatcacttgaggtcaagagttcgaaatcagcctggtcaacatagcaaaaccccgtctctactaaaaatacaaaaattagccaggcgtggtggcacgtgcctgtaatcccagctacttaggaggctgaggcacgagaattgcttgaacccgggaggcagaggttgcagtgagctgagatcgcgccaccggactccagtctgggcgacagagcaagactctgtccccccaaaaaacaaaacaaaacaaggccaggtacagtggcggtggctcacgcctgtaatcctagcactttgagaggctgaggcaggtgaatcacttgaggtcaggagttcgagaccagcctggccaacatggtgaaaccccgtctctactaaaaataaaaaaaaattagccaggcatagtggtgggcgcctgtaatcccagctactcgggaggctgaggcaggcaaatcgcttgaacctgggaggcagaggctgcagtgagccagaggaatattgagggatcagggctcggtaaatagtgggatttgggaaagtaggaaagagggaagaagggccagttccccagggagcagagaaggcctcccgaaatgctctcctcagctttacctgccagtcactgtacccacagccaggacagagccactggggtggaagccggctgagcgggcagggtcctgagaagggagagagaagaggcagggctcagagctggggtcccatgtccatctggacattctcttgcctcagggccaagtctaatctttgcatgagggctctcccctccctctgctgccctttgggacacccccaccccagacaccatggcagccattcctctttacatttctgtagcatgttaacctgaacagaaaccattcctcctgtcactcctgtcccgggatccctccttactcctcttctaaattcccacagctttattcatccaagacgacttctttagataatttcctagatgtgggaatgctgggacaaagggcatctagaattttaagactttatttttgttttttattttttaaatttttatttatttttttgagatggagtttcactctgttgcccaggctggagtgcagtggcacggtctcagctcactacaacctccgcctcctgggttcaagcgattctcctggctcagcctcccaagtagctgacattacaggcgcccaccaccacgcccggctaatttttgttttttttttttcattttttgtaaagatggggttttgccatgttgcccaggctggtctcaaactcctggattcacacaatctacctgcctcagcctcccaagtgctgggattacaggtgtcagccaccacacccagctgaaatttttattctgtttacattttaattaattgtgaatagccatgtgtggccagtggttaccctatgggacagtgtagctctacacttgactgttgcagcggtcacaccttccttgaactcagcggctcctgactcccccctcctcatggcggcacccctgacaggatggttcggtgtcgtcctgggctcccttccagtcaagaacctactcctccaacccttctgagagagcttctaagcacccagttccctagatgaaacccccaccctgcttaaaaagaccttgtttgggccaggcttggtggctggcatctgtaatcccagcactttgagaggccgaggcgggcggatcacgaggtcaggagttcgagaccagcctgaccaacatggtgaaaccctgtctctattaaagatacataaattagctggacatggtggtgtgcacctgtaatcccagctactcgggaggctgaggcagaagaatcacttgaacccgggaggcggaggttgcagtgagccgagatcgtgccattgccctccagcctgggtgacagagcgagactccacctcgaagaaaaaaaaaaaaagaccttgtttggtttcagtctaatgtgctgagccctgacacagggggaaaggtagttctgttagaatggtgcttttccagtccccgggccccttacctcgatgatcctgctccacaggggctggtgggaatctgagctccatagatgcaccagcttatcctgcccgcaggtcacaaactgggcccgactggggtgtgtggccaggccccacagctcttccacatggccctggtggaaagggaggacagcaggatggagacagcagccctggccttttcccactcaacactaatgccagacaaatgctagatgagccccagcaactcaccctgccccagcgggacccagggaagacctttcccagtatgtctgaagggggcctcaattgggcatctgaacccatgccctggtgtgtgactcaaggcaaatcctgccccttctccagggacctctgctttcttctttgcacaatgggaggcaggagggcatggtggctcagagcttgatctcaggggtcagacaggctgcaccctggccacacacctcccaggtctccagctccaaggatctgggaaggcgcttctggagtctgcctgcatccagacagagcccagaagtctgagggacctcatggagggcactaaacctgatggctctgaccttcggctttctattactgaccgagcgcagtcatctaggcaggtgacatctccttgggacctcagtttgatcgcctgtaaaatggggccaattggtatgtatgcctcatagcattcctgtgctcactcaaatcatggatggaaaatgctggccaggtgcggtggctcacgccggtaatcccgacactttgggaggctgaggcaggaagattgagctcaggagtccgagaccagcctgggcaacatggcaaaaccccatctctacaaaaaatacaaaaatttgccagttgtggtggtgcacacttgtagccccagctacttgggaggctgaggcaggaggatcccttgagcccaggagacggaggttgcagtgagctgaaatggcatcactgcattccaggctgggtgatataataaataaataaaatgctaaacatgaggataattcagagaatgtggtcacaaaatggaaatgtctaactattaatatttataacaaattttttttttagacggaatctcactctgtcatccaggctggagtgcagtggtaggatctcagctcactgcaacctctgcctcccaggttcaagcaattctcctgcctcagccttttgagtaactgggattacaggcacacgccaccatgcccagctaatgttttgtatttttagtacagatggtgtttcaccatgttgcccaggctggtcttgactcctgatgtcaagtgatctgcctgcctcggcctcccaaagtaatattaatattatgattaataattataatagccaatataatagtatgggctgggtgcagtggttcatgcctgtaatccccgcattttgggaggctgaggtgggtggatcacttgaggtcaggagtttgagaccagcctgaccaaaatggtgaaaacccatttctactaaaaatacaaaaattagctgggtgtagtggtacatgcctataattccagctactcgggaggctgaggcaggagaatcacttgaagcgggaggcagagtttgcaatgagccgagattgagccactgcgctgcagcctgggcaacagagcgagactctgtctcaaaaatgaaaaaaaaaaaaaaaaagtataaatatagtgcttcccggtaggtgagttctttaattgggtcaggggtaaggaagggagggaggaggccaggaagggaggagcaggcgtttgagcttcgagaagaaatgcaagcagactccagcaggaccttccccaatccgtggagctggagtctgagaggtgtgtggccagggtgtctgcagctgtgggacaacctgtagggacactcaccaacctgaagggtgccacccccaatcagagtggcaggaggcagcacagttggagcaggggcctggggcccctctgctgtgcttggagttaaactcttggttgctggatcctgggaaggggtcctgggtcagggccaggtcagagaagggacagagcagggaggtgaggagaactgggagtggggagggggagtggatgatgcagggaaggccagggaaagagctgggaagaggggaggggtgcagaggagagaggcgcacctggaccagcagtgagaagcctgtgtgcacggagccctgcaggatggaattgcgggtggtccccacgtacagtgtgtctccgtggccctctgccacggtgcgcacagggccaaagtcctcagggacctgggtggacagataagagggaagatgagtaggatgcacacgggtgggtgtggggtgacatactgtggggaggagggtctggcgttgggagccctggtgagatcggggggggcctctctacccccatctgagcccactgcccctcctcacctccacttcctgcagcttgctgtagtcagaaccccagaggaccacccgccgatcacggccccctccagacaccagcgtcccgtcccgcagggcgcagagcccaaacacgccgccgtcgtgggcgcccagcaccgcctgtgtgatacggttcccacctgcagggtggccaggggcagggtcaacagggagaagccacccctatgctgacccctgaaagcatcttgaactctcaagcctatgtccatccattctcacccacttttccaccttttttttttttttgagacggagtctctctgttgcccaggctggagtgcactggtgctatctcggcccacttcagcctctgcctcttgggttcaagtgactctcctacctcagcctcccaagtagctgggattacaggcgcccaccaccatgcctggcgaattttttgtttctcgtagagatgggtttcaccatgttggccaggctggtctcgaactcctgacctcaagtgatccacccgccttggcctccctaagtgctgggattacaggcatgagccaccatgcccggccccacctttcgacctttctatctgctcttccacccacccaaccacccaagcacctgccacctacccactcaaatacaataccttatcatctattcattaaaccatctgcactaacatctacccatccacccatctaccctttgacccatacacccacccatccatccatccactcacttatctactggtctgttagatgaacactatcgactcatccattcatcacccatccatccaccagactatctatccatccatcaccctagccattcatccacccatctctctactgatccatccagtcagccaccctgccatccatccatcaacccacctctcatccattcatttgccctctctcgttttgttttgctttgttttgttttgttttgttttattttgtttttgagacaaagtcttgctctgtcgaccaggctggagtgcagtggtatgatcttggctcactgcaacctctgcctcctgggtttaagcgattctcatgtctcagcctctggagtagctgggattacaggcatgtgccaccacacctggctaatttttgtatttttagtagagacagggtttcactatgttggccgggctggtctcgaactctttgactcaagtgatctgcctgcttcagcctcccaaagtgccaagattacaggtgtgagccatggcacccaatctaataaagacaattttttaaaaagagagggcaggcggccgggttcggtggctcatgcctgtaatcccagcactttgggaggccgaagggggcggatcacgaggtcaggagattgagaccatcctggctaacatggtgaaaccccatctctactaaaaaaatacaaaaaattagccgggagtggtgatgggcacctgtagtcccagctacttgggaggctgaggcaagagaatggtgaacctgggaggtggaacttgcagtgagctgagattgcgccactgcaccccagcatgggcgacagagcgagactccgtctcaaaaaaaaaaaaaagagagagagcgcaggctggccgagtgcggtggctgatgccgataatcgcagcactttgggaggccgaggtgggcggatcacgaggtcaggagatggagaccatcctggctaacacggtgaaaccccgtctctactaaaaatacaaaaaattagccgggtgtggtggcgggcacctgtagtcccagctacttgggaggctgaggcaggagaatggcgtgaacccaggaggcagagcttgcagtgagccgagatcacttgagctcaagtgttcgagggcagcctgggcaacatagcgagacctcatctctacaacaaatacaaaaattacctgggcctggtggtgggcacctgtagtcccaggtacttgggaggcaggaggatcacttgatactgggaggcagaggttgcagtgagctgtgatggcaaccactgcactccagcctgggcgctagagtgagaccctgtcttaaaaaaaaattctttattaaaaaaaaatttttttttttttgagacagagtcttgctctgtcccctaggctggagtgcagtggtgccatctctggtcactgcaatctccacctccagggttcaagtgattctcccacctcagcctcccgactagctgggattacaggtgctcgccaccatgccaggctaatttttgtatttttagtagagatggggttttgctatgttggccaggctggtcttaaactcctgacctcatgtgatctgcctgcctcggcttcccaaagtgctgggattacaggcgtgagccaccgcacccagcctaaaaacttttaaaagtaaagatgaggtctcactatgttgccctggctggtctcaaactcctgggctcaaccagtcctcctgcctcagcccctcaaagtgctaggattacaggcatgagccactgtcccagcctcaacccattagtttgttaataaagtcatccattggttggagcaagtatttcttcacccaaccattggctaagacaagtcatttattcatccaatcactgattaacttcttggaacaatctgttcttcataacacattaatctgttggctgaaacaaccattcattcattcactcactcattcactcattcattcattgctgtatagatccactgcctgagacaaaacctattcactaacatagttagccattagtggtaacaaccactcatttgttcctttacccagtcactctccctttaaggaggatgacacattcatttacttattcttccatccatttcctaggatcacaccttcattcattccttcattcacttattcattgatccacacgctgggacaaagcacttgtccatgtatccattcatctacccatccgtccttccttccatccacccatccatccattcatcatctaaacacaactgagctaacccattcattgataatctggacttgatccctaacaagggatttccagagggcaaggcaggggggagtcaataaagatttcctggagatagggatacttgagctgaaccttgacgagggtgttggaatcggacatccatttacactcatttcacacaagcagaattccacgaagggaggcagagccaggagtgtttcagaagactggattgggaaccaaacagatggggtgacactgacctttgccccaaacatagaggttccccccagagtcccccgtgaccacgtcgccaccttccaaaaaggtcacacacagcacatacttcggtttctcatgtttctaaggtgggggaggaaaggaaggtgtcagagcgtcactgaagcaggtagcctcccagaggtcatctgtcacccaggaccgtggccaggcaatcccctctatctatgcgtttagggtaaggctctgcgtggagcatcccttctcccacctgcctccatccggcctgcagtgcttcggtggcctagaggttctgaccacaattgtcttgctttcctacccctgggcccacttcctgccctctctctggtccccctgactctttcttttgagatacagtctcacctgtcatctagaccggagtgcagtggcatgtctcggctcacagcaacctccccctcccgggttcaaacgattctcctgcctcagcctcccaagcagctgggattacaggcctgcgccatcatggccggctaattttgttttgtttttgtttttgtttttcagacggagtctcgctctgtcaccaggctggagtgcagtggcgtgatctcggctcactgcaacctccacctcccgggttcaagcgattctcccgctgcagcctcccaagtagctgggattacaggcgcccaccatcacgcctggctaattttcatatttttttagtagagatggggttttgccatgttggccaggcgggtctgaactcctggcctcaagtgatccacccgcctcggcctcccaaagtgctgggattacaggcgtgagccaccgcacccagcctggtccccctgacttctcccctcctgtcggcgcctcattcatcctgtctctcctcctccctcctcacctccagtctgtctctctaggtcccattccctgcctcactccaccttctcagtgtctctgtttcatctccgtgcccagtgttctctgggcttcccttttggggtggaagccccatctctcaccaaaggcaatgagccctatgggaggaagccctgtgtcttcccaccctctgcttcccactcaacttgtggctctctcagccaggcagcctctgagttctctgattatccatcatatcgacaaccgcagcacccctgtttttgtttttgtttttgtttttgttttttttgagacaggatctcactctgtcacccaggctggagtgcagtggtaccatcatggctcattgcagtcaacctcctgggctcaagcggtcctcccacgtcagcctcccaggtagctgggattacaggtgcgcaccaccatgcctggctaatttttgtattttttgtagatatgaggtctctccatgtttcccaggctggtctcgaacttctgggctcaagggatcctcccacctcagcctcccaggtaactgggattacaggtgcacaccaccatgcccagctaatttttgtattttttgtagatatgaggtctcaccatgttccccaggctggtctcgaactcctgggctcaagggatcctcccccctcagcctcccaaaatgctgggattacaggcgagagccaccttgccacagtacccatttattgaccatttactatctgctaggaactgctgtactcttcatccctttgaatcctcacaactttttttttttttttttttttttttttctgagatagggtctcgttctatcacccaggctggagtgatcatttgatcacggctcactgcagccatgagctcaggtgatccttccacctcatggtgcccggtcaccctcttaactccagagttaaggtggatcatcaccatggtatggagaaagaaactgaggccccagcaggcaacatctcagcgtccctgtaatcccaaacccctgccaccctctgggggatcttgctacctccctgcctgtccctaactacctctctcagggccagcctgtcccccaaacccctggcactcacctcaaagaggccttgccgcttgctcaagctgcccccctccaaggtccagaagtagatgtgagatttcccgcaggtgataagcacagtggggtccgtggggtggaaggtggccaccaatacagcctcattggagcactttggggggtgggggagattctgaatgaggacctcaaagtccccaaggctactatacccgcccctcacaggactgccctaaacggctgtttgtgttgtatgctgcacacctgaacttttcttttttttttttttttcagggcagagtctcaccctgtcacccagactggagtgcagtggtgcaatctctgctcactgcaacctccgcctcctgggttcaagcgattctcttgcctcagcctcccgaatagctggtattacaggcaggtgctaccacacccagctaatttttgtattcttagtagagacaggatttcaccatgtttcccggctggtctcgaactctttacctcgtgatccacccgcctcagcctcctaaagtgctgggattacaggcgtgagccactgcgcccggcctttttttttttttttttgaatatgagtctcgctctgttgcccaggctggagtgcggtagcacaatcttggctcctacaacctctgcctcccaggttcaagagattcttctgcctcagcctcccaaatagctagatttacagggacgtgccaccacacctggctaatttttgtatttttagtagagatagggtttcaccatgttggccaggctggtctcaaactcctgacctcaagtgatcttcccacctcagcctcctaaagtgctgggattacaggcgtgagccaccacgcctggccagtacctttcctatacggtaaattaaagtacaggaagcaggacaagccagcgaagcattatcatcttcttcatcattaacaaaacagcagacacttggagctcctctcctctgccctaagcactgtgctcaacattttacaatcattagctcctttaatcctccatctccctgtgaggtcaagaccattatgcccacctcattgcaaattaaaaagtgaggctcaggctgggcgtggtggttcacgcctgtaatcccagccctttgggaggccaaggcgggtggatcacctgaggtcgggagttcgaggccagcctaaccaacatggagaaactccgtctctactaaaaatacaaaattagctggtcgtggtggtgcatgcctgtaatcccagctactcgggaggctgaggcaggagagttgcttgcttgaacccgggaggcggaggttgcagtgagccgagatcgtgccagtgcactccagcctgggcaacaagaggaaaactccgtctcacaaaaaaagtgaggctcagagagggccgggtgtagtggctcacacctgtaatcccagcactttgggaggccgaggcaggcggatcacgaggtcaggagttcgagactggcctggtcaacgtggcgaaaccccatctctactaaagatacaaaaaaattaggcgtggtggtgcgcacctgtaatcccaactacttgggaggctgaggcaggagaatcacttgaacccaggtggtggaggttgcagtgagccgagatcatgccattacactccagcctgggtgacagggcgagactccatctcaaatagaaaaaaaaaaagtgaggctcagagagggtaaaccatttgcctaaggccacacagctaggcaagagttgtgtgtggaacccagctcacctagccctaattccagagcacagcctccgcaccatttctgtttccccaaacagtgggccttgattcaaaacccaggtttccaccaggcgcagtggctcacgcttgtgatcccagcactttgggaggcagaggcagatggatcacctgaggtcaggagttcgagaccagcctggccaacatggtgaaaccccgtctctactaaaaatacaaaaattagccgggcatggtggcacacacctgtagtctcagctactcaggaggctgagtcaggagaatcgctggaacctgggaggtggaggttgcagtgagccaagattatgccattgcactccagcctaggtgacaagaacgaaactccgtctcaaagtaagtaagtaagtaagtaagtaagtaagtaaataaataaataaatagaacaaaacccaggtttccttcccctagcccaggacaggtgtgcaacctgaggcaagtatctcttcccctcaccatgcctcatccttaaaataggccacctctcagagagggaaatcgagacaccagaggactgcagagtcagcaagcagccacctcaaacccacccttctgttgggcctggtccaccgtaccccatatctccatatcctcaccaaggccctacgaggaagatgctaccattatccccattttattttatctatttatttttttgaggcagggtctcactctgttgcccaggctggagtgtaatggtgcaatcatggctcactgcagcctcaacctaccaggttcaagcgatcctcctaccttagcctccgaagtagctgggactatgggtgcacaccacacccagttaatttttttttttaagtgccagattttctgtttgttttgttttttgtttttgagacggagtttagctcttgttgcccaggctggagtgcaatggtgtgatcttggctcaccgcaacctccgcctccgggttcaagagattctcctgcctcagcctcccgagtagctgggattacaggcatgtgctaccatgcccagctaattttgtatttttagtagagacagggtttctccatgttggtcaggctggtctcgaactcctgacctcaggtgatctgcctgcctcggcctcccaaagtgctgggattacaggcgtgagccaccgtgcccggccttttttttttttttttaagtagagataggtctccttatgttgcccaagctgatctcaaacttctgagctcaagcaatcctctcatgtcggcctcccaaggtgctagggttacaggtgtgagccaccttgcccagcctattatccccatattacagatgagaccaccaaggctctgaggtggcaagcggcttgctcaagtcacacagccagcaaggagtaaagccagggcttaaacacgggtctatctgattgcagactcctaaccactgagattgggaaagtcccacagtggcacccagcaggaggggatgagaaaagtcacctcaccttgacatccaccaccttggtctccttggcccagtcccacaccgagagcatgtgatcattggattcatccactgcacacagcaggttgcctccattctaaagaggaggagagaggagggggacagaggcaaggggagtcagggcccatcctccccccatgcccaccaaggcattcaccacacaggcctgttttaaaaccttcaggctgggcacagtaggtgggaggatcgcttgagtccaggagtttgaggccagcataggcaatatagggagaccctgtctcttaaacaaaacaaatttaaatattaaaaaaaaataaaaagccaggcgtggtggctcacacctgtaatcccagcactttgggaggccgaggcaggtggatcacgaggtcaggagttcgaggccagccttgccaacatagtgaaaccctgtctctactaaaaatacaaaaaattagccaggcgtggtggcaggtgcctgtaatcccagctactcgggaggctgaggcaggagaatcgcttgaactgggaggcagaggatgcagtgagccaagattgcgccattgcactccagcctgggtgacagtgagagactctgtctcaaaaaaaaaaaaaaaaagaccttcaaaggccctggccattttgcaggaaacacattaaaatacaccctccattagaagctgtgaagacatctgaaatggtttcatactatgccttgaaatgactcatccctaataaactcatttcatttgccctcagctattgtttctctgcagccagcacccctagccaggaattcttgctgacatcatctcatttgcatttacatatatagagaatgactgatgtaggtgaaattcagcagttaacaaagttggtattatgttgggtttttgtttgttttttattttattttattttttgagactgagtctcattctattgcccaagctggaatgcagttgcatgatcttggctcactgcaacctccacctcccaggttcaagcgattctcctgtctctgcctctcaagtagctggcacatgccaccactgccctcctaatttttgtatttttagtagagacagggtttcactatgttggccaagctggtcttgaactcctaacctctggtgatacaccagcttccaccttccaaagtgctgggattacagtcatgagccacctcgcctggccaatgttgggcttttatacctttcattaaatacaggttaattttgatttggcaaggttttattttcttctccacacctttggtaacaatatggcttacccctaccccaagctcttaaatgtttctttaggcctcagaaaaccggtgagggtccaatccagtgcctcttaagctatctgtgcaggagactggctgttttttactccctaatccattgaagactaatattttaatcaaatatgataaaaatgtaaaatatgatttttatctatctatctatctatatatttttgagacagagtctcactcggtcccctagtgtggagtgcagtggtgggatctgagctcactgctacctccgcctcccaggttcaagtgactctcctgcctctgcttcctgagtagctgggattaccacacccagctaatttttgtatatttttagtagagatggggtttcaccatgttggccaggctggtctcgaactcctgacctcaaatgatccacccatcttggcctcccaaagtgctgggattacaggcatgaaccgcatctgaccaatttttatttattttttaaagtcagcgtcctgccatatcgcccaagttggagtgtagtggcatgatcacagttcactgcagcctcgatctcctaggctcattcaatcctcccacctcaacctcccaagtatctgggagtacaggcccaggcccacactagtacacccagctaattagaattttttttttttttttttttttttttagttggagtctcgccctgtcgcccaggctgcagtgcaatggcgcgatctcggcggctcactgcaaactccgcctcccaggttcaagcaactctcttgcctcagcctcccaagtagctgggattacaggcaccctccgccatgcccagctaatttttgtattttcagtagagacggggtttcaccatgttggccaggctggtctcaaactcctgaccttgtgatccgcccgcctcggcctcctaaagtgctaggattacaggcgtgagccactgcacctggcctttttttttttttgagtacgagtctcgctctgtcgcccaggctggagtgctgtggcgcgatctcgactcactgcaaactccccctcccgggttcaagcgattctcctgcctcagcctcccgagtagctgggacgccaccacctcagactaatttttgtactgtttttggtagagacgggcttcactacgttggctaggctggtctcaaactcctgacttcaaatgatcctcccacctcagccccccagagtgctgggattacaggcacaagccaccatgcccagccaaaataggatttttttttaaaaaaaagcccacaatcacacacttggatgttgtggtgttgtcaaactgctctccaaattcctaaaggcatactctcgctttctgtacttatctctgcctggacatgccaaaacccgcctgcaaatgggcaaggaccagctgggccctaggcactgggtttaaaatgcctgagagggctgggcgggcacggtgactcacccgccccttggggtgaggacacgccctcattgtgacgtcacagaggcgggccacgcctccagcaggattcccggccctcaacccaaggggcgggtgaaaaggtgcgggcacttgccctccttttcggggcgaaggggcggggttagggtgggcgaaggacttacagatttggagaagcccacacagcacacggctctgtcaaacacccccaagcccagcacgtgtaaggtggagagggaaactgagtcccagatgcgcacgtggggcggcagcggctgcagggaagagaggcttgttaccttgggggtgccagctgcttgtcccccacaactgcgtcctgcactcttttctgctttcccctcccttccattaccttcccttccttagtggttcccgccacctgtcccgtggcgatggtgaccatatctgggtggatggccaagctgcggaaagaagggacagagagaccagggctcagtgggagagaagaggctcacagagacccaggacattcattccacaaattggctggttgagtttagtcaataaacgtgtatttagtgcattaatagcagtgagcggatgccctccgggtgcgctggcgctggatcagaagcaagacttaggcctggggcctctaactcaaatgccagcaggacgcaggtctgtacctcacatagtggccaggagagcacacttatttaagggggctgacaccaccctgctccagccaccaggaattgtctggagtgcctattcagttttttttttttttaagaggcggagtctcccagcactttgggaggccgaggcgggcggatcaccagaggtcaggagtttgacacctgcctggccaacatggggaaaccctgtctctagtaaaagtacaaaaattagctgggcgtggtggcgggcacctgtagttccagctactcgggagactgaggcaggagaatcgcttgaacccaggagcggaggttgcagtgagtcgagatcgtgccactggactccagcctaggcgacagagtgagactagttctcaaaaaaagaaaaaagaaaaaaaaaggagatggagtctcgctctgtcccccaggctagagtgcagtggcaggatcatagctgactgcagcctccaactcctggacttcagcgatccttccgccttggcctcccaaagtgctgctttcacaggcgtgagccacctcgctgcccagattttcaaaagaagaaaaagatccaggcattgcgtgaattcactgtctgaattttttttgagacagagcttgctctttcacccaggctggagtgtggtggctcagtcactgcagcctcgacctcctgggttcaagtgatcctctcgcctcaacctcctgagtagctgggaccataagggcttaccaccacacccaactaaaacacctgaaatattgaaatattgatactcaatccacattttcccactaaattcagcctgagggcagctggtggctttggagagggagcaaaggcttagccttgccccaaaccccacagggtagcaatgtgaaaagaggcatagaggggcaggggctggagctccatctccagccacagctccctcccgtcccctctgtcccacatctcaccatttgatgtcatcgttgtgtcccaggtagtgtcgctgcctctgctcctccacgctgtatagcacggctacggaggccacaaagtacactatctccccggtgggcagcaaataaaggttggcccggcagtctcggccacggtagccatagctggagccacccaggggctggttaaggaatgtgttttgttgttgttgtttgtttgttttgtttttatttatttatttatttttaatttttttatttatttatttttttgagatggagtctcactctgtcgcccaggctggagtgcagtggcgtgatctcagctcactgcaagctccgcctcctgggttcatgccattctcctgcctcagcctcctgagtagctgggactacaggcgcccgccaccatgcccggcttattttttgtatttttagtagagacggggtatcaccatgttagccaggatggtctcgatctcctgaccttgtgatccacccgcctcgccctcccaaagtgctgggagccacggcacccagcctatttattttttcttttttttgagacgcagtctcgctctgtctccaggcagcagtgcagtggtgcaatctcagctcactgcaacctccgactccctggttcaaacgattcccctgcctcagcctcctgagtatctgggattacagacacacgccaccacacccagctaatttttgtatttttaatagagatgggatttcaccatgttggccaggatggtctcaatctcctgacctcatgatccgcccgcctcagcctcccaaagtgctgggattacaggcgtgagccaccacgcgcggcctgttttgtttttttaagacagagtctgtcacccaggctggagtgcagtggcatgatcccagctcactgcaacctccgcctcctgggttcaagccattttcctgtctcagcctcccaagtagctgggactacaggcagatgccatcatgccaggctaatttttgtatttttagtagagatggggtttcaccatattggtcagggtggtctccaactcctgacctcaggtgatccacccaccttggtctcccaaagtgctgggattagaggtttgagccgctggcgcccagccgaggaatgtattttgcatcacacacactggctgaggaccagactcaacaaggtcattggaatgaggtttttctgtttccactctcacccctgtagtgggctgatggtcccctcccactccaaaaaaaaatgaatgtctgtttccttttttttttttttttttttttttttgagatggagtttcgctcttgttgcccaggctggagtgcaatggtgtgatctcagctcacggcaacctccacctcccgggttcaagggattcttctgcctcagcctcctgagtagctgggattataggcatgcgccaccatgcctggctaattttgtatttttagtagagaaagggtttctccatgttggtcacgctggtcttgaactcccaacctcaggtgatctgcccacctcggcctcccaaagtgctgggattataggcatgagccaccgcgcccgggctatgtctgtttcttaatccccacaacttgcaaatgtgaccttacaaggaaaatgggtctttgcagatataattatagatctcaagatgagatcatcctggattatcagagtagcccctaaatccgatcacaagtgtccttataaatgacagaagaggcagcctcaatctcctgggcttaagtgatcctcctgcctccgcttcccaaatagctgagactacaggcatgcaccaccatgcccagcaaattttttgtatatttttggtaaagatgcagtctcgccatgctgcccaggctggtctcaaattcctgggctaaagcagtccacttgtcttggcctcctaaagtgctgggattacaggcatgagccaatgcacccagcctgcctggctaattaaaaagaaattttctgtagagatgggatctcgctttgttgcccaagctgatagttatctggtttatttgttaactgctcatattccccaataagactgtgagttccatggtggctgagattgggctgttttttttgtttgtttgttttgtttttttcatttctgtatctcctcctccaggaagccctccatgactccaggctgggtcagccctgtccctgtggattccccatcccagtcttgcacactctgggttgtcactctcaatgagtctgttcccatgctagactgtatgccccaggagggcaggcagatgctgtcatggtcagcactgggtccccagccctatgtctcagatgttcagaaaatatcttgaatgggccaagcacggtggctcacgcctgtaatctcagcactttgggaggccgaggcaggtggatcacttgaggtcaggagtccaagaccagcctggccaacatggcgaaaccctgtctctactaaaaaacacacaaaaaaattagccaggcatggtggcccatgccacccagctactgtagtggccgaggcagaagaatggcttgaacccaggaggtggaggttgcagtgagccaagatcgtgccactgcactctagcctgggtgtctcaaaaacaagaaaatatctgaatgattgtcaatatacatatatcctgaccccatgaaactgctctgacctgcagtcactgcaaaggggagcaatctgaggtcctcacttttgcagtctcagccacctctcatcagatgcttatcaagccctactggcaggacatttgggacagattccaggggatatttccagctgcctcgagaaggctctgggcacccagaaggccaggccatttcaccaaccaccctggctcctccaaagaggaaaccaaggcccagagagaagcagacaaggaccgggttcctggggtgtggactccaagctcaataggattttaggaaaaagtttgggtcccagaatcaggattgttgtctcctacctataacctcagtttccttatctggaaaggaggtataataatttccaaactgtaggcctcagagctcttggaggccactagttgtaaaaaaataaattcatacctggaataacttacaacagtgtctgtcagatagtaagtgcttgagttattattttggatttttttttttttttttttttttttgagaaaggagtctcgctctgtcgcccaggctggagtgcaatagcacaatcatggctcactgcaacctcgacctcccaggctcaagtgatgctcccacctcagcctccagagtagctgggaaccacaggagcatgccaccatggctggctattttttttttctttttcttttcttttttttttttttttttttttttttgagacggagtttcactcttgtggcccaggccggaaagcagtggggcaatctcggctcactgcagcctctgcctcctgggttcaagcgattctcctgtctcagtctcccgagtagctaggtttacaggcacatgccaccacactcggctaatttttgtatttttagtagagacaggatttcatcatattggtcaggctggtctcaaactcctgacctcaggtgatctgcccacctcggcctcccaaagtgctcagattacaggcatgagccaccgcgcccggcctgctattttatttcctgtaaagacgaggtcttgctatgttgctcaggctggtttcaaactcctgggttcaagtgatccacccacctcggcctcccaatgtgctgagttagtgttttatcagtccctgtgcatggggcacatactatgagctcagtacctttacacattatttcacaggtctatggacctgagatcataaaattcatttttcagagtcaagacgacttttccagggtcacacggccaggtacgggctggactggggtttgaacccatctctgtcagactccagagcccgggcttccagccattcccaactctttttgctcaaatgcaccaatcccactctggccacatagcccttgaacgtgctgtgcttgttttgtgtgttgcccaggcaggtctcaaactcttggcctcaaacgatcctcccaaagtgctgagattacaggcctgagctgccttgaccgcctttctatttcctcctggggggatgggagcaccaaggagattccagcaaaaggatacacccactccagcttgagccggcaagaaggcagctccgagcgtgtgtccaggctgtaggtgggtgccagctcgtctgggatcatcatgggcacagggcggcccctcaggaacattttcacggagccatcctctgccaggacacccccagaggtcaggcactgacaccagccccatccctattccctctcctcttccagctttatttatttatttttttaaaggcagggaaactgaggccagagaggcaaagacccagtagccaagactcctgacctctggctccagcctgtcaccccaacaagcaagcttccaccgagcccttccccatctccccactcacccacactgaagataacttctttggttttgctgtcaggaaaggacaaagaaaaaaaaagggtcttagtattcagttcagaaaaggggagaaaccattcctccacccccaccgctccccggaggtctccgatgaaaacggggccgagtaaggggcagagcgctgcctctctgcaggccgtgtgctttgctcggttgatcttgcagagcctaagacacaggcccagagaggcagtgatcgccaaagatcacacagcacgaagtggcagggacgcgatcctggaagaagggagtcaccaaggacccttccctcctaatcagcaaggtgctccccagcgccccccacccgcagttcccccagcacaccaaacgtcaagcagagggagaaacggggagagtttaagggaaggggcgtgtccccacgccggtctgggtcccaggggttgggtgaaacctgagatctaagccccgggagcgcggagaggagatggggggtggtctgcgaaagggtctcacccagctccaaagctactcatggcggcgggtggcggagcttcggggccgggggtggagccgggaccggctctgccgcttccggccctgggaggcgcccgggccgccgcgcccctgccccgccctccacagccacccctggagccggagggtcccaccgggtcacacatcccgggctgtggactcccgatcccaggttctttcggggtgggtgggggagagtggttgagaacatggactcgggagcgcgcctgcttgagttaaaaccccagttctgctaattcctagcagtgtacacaggtcgtccaacctctgcctcggtttcctcatttaaaaaatggggataataagagtacccggccgggcgcggtggctcatgcctgtaatcccagcactttgggaggccgaggcgggcagatcacctgaggtcaggagttcaagaccagcctggccaacgtggtgaaaccccgtctctactaaaaatacaaaacttagcctggcgtggtggctggcgcctgtaatcccagctacttgggaggctgaggcaggaaaatcattcgaactcgggaggcagaggttacagtgagctgagattgtgtcattgcactccagcctgggcaacgagaacaagactccgtctcaaaataaataaataaataagagtactcacacctcccgggggtagttgcgagggtgaaattggttaattattgggaagtgcctggagtatacacaacgctgtatttgtgtttgctatgtttgagcagagttgaaatgtgcagcttttgaccttggtcttgcccttgcgtggcctcctagcgctgaccacgcccactgcaccataactccagccttagggtgatttttgttttgttttgtttttgatacagggtgtggctctgtcgaccaaactggagtgcaatggcgtgatcatggctcactgaaacctcgaatttcctaggcttaagtgagcctcctgccgcagcctcccaagtagctgggtctacaagcgaaggccagcacgcccggctattttctttctctctctttttttttttgttttttgttttttgttttttgtttgtttgtttaacggagtcttgctctgtcagcaggctggagtgcagtggcgcgatctcagctcactgcaacctccgcctcccgggttgaagtgattctcctgcctcagcctcccgagtagctgggactacaggcacgcgccaccacgcccatttttgtattattaatagacagggggtttcaccatgttggccaggatggtctcgatctcttgaccttgtgatccacccgcctaggcctcccgaagtgctgggattacaggcgtgagccaccgcgccaggcctaatttattttcatttttagtaaagacgagggctcgctattttgcccagcctggtctcgaactcctgagctcaagcgatgattcccgcctccgcctcccaaactgctagaattatatagccttagtttttgactctgtccagatcttcagtatggccccgcctctggagttgaccacgcctgtcattctgagcctcccttctaaccctgtccctgagttgactcagttgcttgagaattgactgctacctcccgccaacgctccttctccggcccgccaggcattctgattacgtccattttcacgtattccttatgtgaataccttcgaggcctccaagttggctgcacctcttggcatttgaccacgcccctacggccccgcccaacctttaagccacgcccttttcaacctggcagtgccccccgattttgatgtcaaagcttctggaatctggaatgcctccacctggtctcagcctctgttactccgtaccccagattttaatttcgcccaggcgaacactgtggctgcacccttaaattcctcagactccctctttccttgtagaaactctgtggctgctgccttgacttcatccctgaaactcaacggggcctctcctgtaccttaataaccacgcccataagccaagctcctccctgacttcctcacccagtagacctgaccgtccagcttctaaaaactctggccacgcccctcaatattgactccgccctcccagaccttccactgttaccgtgccacctcaagattggtccctccaaggctctggcaccgtccccgcttttgaactagctggccccactctaggttacgacctcgtggcctggggcatgactacatttctcgaccatttcctccctatctctttctgcggcttgacgccgccccagtccttacccttcctttttggcgctacagttgctgctggaggatgtggtccggctgcgggggtcctcacggcgcaccgaggcgaggcgctctggtgacaagtagcggcggacactgctaaaagagagcacacaggtgggggcagagccttctaggccagcaggcgagtgccgtgagcaagcgagattctccctgcaccctctgctgctggagctcaggcaaacaaaccacctctgtctcccacgaggtcttggaagaggctgggggtcccggccttgtgccttacctgcgcccggaggtcgcctccttcttgggagaggatggggacgtggcatagccacccacgcgccgcgggggtcccgagccattaaggggcgtcctggtgggaaggcctttcaagagctgacacactggagggatggggttaggggacagaagagggtgagtataaggaccaggccccggtcctccccatcccacccctccagtctaacggggatacccgaggcagtggtgcctaagcgcggaggcgcccggcccttgggggtgccccgcgcgcgtagcgccgctccctgttcttcgcatgcccgcaggcgacgcagagcatccgccagcgccgcctttaggaccgccagctcgtcttcctgtaactgcagccgctgctccagcgccgacacgcggtcgtccacttccataccgctcgtgcccgacaaattgtcatctggaagacgggggagtgccggctgcagggccacccaggagctccagtgcccaaggggtccctcccgccttcctgggtctaagcggggggccagccacgcccctttcctgtcccgctacctggggctgggacacttggacatgagccaaggaagaggactctgaagggggaaggaaatccccacagctctccaacccatccgcacactcctctctgccacagcgcgctggccgtgtgaccttggggaagtcccttccctcttattttctaagagtctgtgaacccaggagcctctcgctctggctttaagatgctatgactaagacgtgaccaggcgcagtggctcacgcctgtaaccccagcactttgggaggccgaggcgggcgtatcacgaggtcaggagatcgagaccatcctggccaacatggtgaaaccccgtctctactaaaataaaattaaattaaaaataaaataaaatttaaaaaaaagccgggcgtggtggcgcgtgcctgtagtcccagctactccggaggctgagacgggaatcgcttgaacccggggggtcggaggttgccgtgagccaagatcgcgccactgcactccagcctggccacaaagcgagactccgtctcaaaaaaaaaaaaaagaaaaaagaaaaagaaaaaaaagattctttgattttatgactaagacgttaagtatctatgagtgataagagcatttgcaaaatgacaccaacctactcctaatgacactaaagttctagaattgatccccaacatcctccgacgaagattctgttatgaataccaacgtctcttcactgtttctaagactttccaagccaaaaggtcatgcctagcctccccgtttcccctcctctcctcaccctggggttcgaccctagagccagctgcaaggacagagcttcggcggcccctggcggcggacttgggggttgcaggcagcgcatggcagacccagaagacccaagggagatgcagaccggattgacaaccaaactcttccccagcaggcattcctcttttctgttccccttctttatttcgcctctgtaccccgcgccccagatttggctctccagcctatgggtgcagccaaaatgactccccgagtcgcccccccaaccccgctcattttcccaaagtgggaggggcggagaccgaagtggcccctctcccccttttcccgcagaatactcatacccagactcattgctgaccacaaccaaggaagccctggttcccagcctggtggaagtaaaggtggtagcttagacggggacagggcgtggagctcgcccctgccatcccgcgtccacaggccgcgcagctggccctctgggctccgcagtgcagccgccgctcctccctccttcccttcgtagcccaatcgcctgccgaggcttgcccgccctgccccccactcagcgcctcccaggtccggtgcctggacctgcagagggaggtgggagcctcctgaggtcagaaggagtgagccgtcaggacttagaactcgtaacagggggaaacctctaggggtcttgttggcatcacgttttgcagacgggaaactaaggaaggaggctagtaggagtgtgcagagacacgccaaagatcactcagcccgtaggtgggggctggggacccaatcacctcctgtgctcagcctggtcctacctaccattaattatacgaccagaaaaatggcatctgttactgtgagcttacatgtgccaggcactgctcacgcaaaacatttagcacgttcccggctcatgttgatgctcgataaatccagaataggattaactatttttatgatacctaatgcttttggcaactctagtagttgtagtagcataatccattttaggaggagaggaggaggaaggttactgaagcccagaaaggtgacgttacttgttacacggacacacagccgttcaatggaagaacccatactcaacaggaatggccaccctgtcattctggctcttagagggacagaggaggacaaaataagcattctgggtcccctgccaattccagtggtccctggcactagggtgtgtgcccagaggactgaacctccaaactgagttaatagaggtgctttcatcttgacccttctgccccacccagagaggccagctgcactgtcaggccttggccagcccatcctaccaacccccacacctccaccatccccatccctgtgactcaagccctccgctccctcctgaccatccccccatcctcagccttttcccagagaccaggcctcacttcccacttttccctcccaactcccctcttctcctatctcccctcacctgagcccgacacccacagtggtccttctggtatcacacccatttgtctagggagaagggatggtgctaatgcatgggagggccagggccagaggatttgggaggtatcctagaagcaaagtcctctggccgtccctttccagtcccacactctgccctcaactcaacaccaaatccacccccaccccctctgtctgtccccctgctatggagataggggagcattccagaagcttgaggggagagagaaagggcagagttccaggcccaatcgacccccaggccgttcccccttccaatcccaggttccttcgggttctgcccccttctctcctctccgtctagccacctcgggagtacagaaggatccaagtggatggggggctgggatctaggttttggggaccagggaccttgctcttgggtcagggtcctgctgagggagagaaaagggggatcttcagcaagggagggggttggggacttgcaaggaggaggctggggcaagaagagatgggtccagccttgggcggggccaaggtcggaactgaggaggggtctcaccgttgcagtatcgcagcagcgaggacgtgtcgtacaggccgcagaaggccgggccgcgctccgccatcgccccaccacagccaccgccggcccccccggtcccagcccgggcccggtccccccaaccaggccctgcctcccgttgccatagcaacgcccttcgttccagcatccccagctcagctcgcctggcatcaggcggccggcgccgggcccggcgctggggtcatccccaggatgcccagaaaggggggtcgggacaccgcctgccaagccccccaacacaatcctagggccaggattggctgcgcccggatccccctaggtaccgtctggtcccgcccacaaccggagtatagtctctctagacccccctcctcgcccgttcagaaccaatgagagcctgtcgcgcagggcccttcaccaatagggatgcagagggattggaaggggcagggtctttcctgctttcagcctgaagcgcagccccgagctccgggaggaggatggtgtggaggaagacactccactatccccaaaacctcttcagactttcattggattttccaaaagccccctccgtaaggccagggcccgaccttagagccccaaacccgcccagggagctcttgtttatgacatctaggcccacccccaggctcttagccccacccccagaatcttgcgggtgctaaagttttattcctacccacggaatcattagcaccgcccctgaaccgccaagggtttatagtatagtacttctccagagctctggacaggaccttcttataggattagctctggcctcggaatttaaatccctccccccgcggtctggtagtccctccctaactttccccaccgctctgtctgcggccccaggcccttagctccgcccttagagccctagcctcccacaaccgcattatccagtccgggctttggcacaggcccagttgtgaggcttggactagcccgcgtgtcaggcagagatggctcgaaagttgtgggggaaaaggggagggtacaaaacccgacaatggatttcaagaatattggaccgccttcctcaagtctccaacgacggtaaacacctagagtataggcaggagaagtgaagtccggagccgaaaaagaattccctctggacacagagatgaaaagtagaagttttggaagcagattgacctgggtttgaatcctgactcctccactttctggtttcgtgaccctaaagctccacttcctcatctggaaagtgggggctcataatcgcgcctgcctcattcattcattcaaaaatgtttactgagtgcctaacgggccaggctctgttctaggtgctgaagttttcggaatgaccaagtgaacctgtttcctctcatgtattgttcatttaatggaagaggtaaacaatcatacacaaaataaataacaatacctaacgtttaatcagcagtcactatgggcaaagcactcagttatcctcaccaaaagccctattttgttgttgttgttgttgttgtttgcttgtttgttttcgagacggagtctctctctgtcgcccaggatgtagtacagtggcacaatctcaactcactgcaacctccgcctcctgggttcaagcgattctcctgcctcagccttcagagtagctgggactacaggcgcacgccaccacgcccagctaatttttgtatttttagtagagatggggtttcaccatgttggccaggatggtctcgatctcttgacctcatgatcctcccgcctcgtcttcccaaagtgctgggattacaggcgtgagccaccgcgcccggcctatttttttatattttaaaaatattttgtggagaattgcttgagcctgggaggcggaggttgcagtgagccaagatcgtgccactgtactccagtctgggcaacagagctggagagcagaggcgcgatcttggctcactgcaatctccgcctcctgggttcaagcgattctcctgcctcagcctcccgagtacctaggactacaggtgcctgccaccacttccagctaatttttgtatttttagtagagacggggtttcaccatgttggccaggctggtttcaaacttctgaccttgtgatccgcccgcctcgacctctcaaagtgctgggatactttttccttttttttttttcttcttaagaaactgggtctcccactgttgctcaagctggagtgcagtaacatgattatagctctctccctctccctctccctctccctctccctcctctccctcctctccctcctctccctctctttccacggtctccctctgatgcagagctgaagctggactgtactgctgccatctcggctcactgcaacctccctgcctgattctcctgcctcagcctgccgagtgcctgcgattgcaggcgcacgccgccacgcctgactggttttcgtatttttttggtggagacggggttttgctgtgttggccgggctggtctccagctcctagccacgagtgatccaccagcctcggcttcccgaggtgccgggattgcagacggagtctcgttcactcagtgctcaatggtgcccaggctggaatgcagtggcgtgatctcggctcgctacaacttccacctcccagccgcctgccttggcctcccaaagtgccgagattgcagcctctgcccagccgccaccccatctgggaagtgaggagcgcctcttcccggccgccatcccatctaggaagtgaggagcgtctctgcccggccgcccatcgtctgagatgtggggagcgcctctgccctgccgccccgtctgggatgtgaggagcgtctctgcccggccgccccgtctgagaagtgaggagcccctccgcccagcagccgcaccgtctgagaagtgaggagtccctccgcccggcagccaccccgtctgggaagtgaggagcgtctccgccaggccagccgccccgtctgggagggaggtgggagtcagccccccgcccggccagccgccccgtccgggagggaggtgggggggtcagccccccgcccggccagccgccccgtccgggagggaggtgggggggtcagccccccgcccggccagccgccccgtccaggaggtgaggggcgcctctgcccggctgcccctactgggaagtgaggagcccctctgcctggccagccgcaccgtctgggagggaggtgggggtcagccccccgcccggccagccgccccgtccgggagggaggtgggggggtcagccccccgcccggccagccgccccgtccgggagggaggtgggggggtcagccccccgcccggccagccgccccgtccaggaggtgaggggcgcctctgcccggctgcccctactgggaagtgaggagcccctctgcccggccaccaccccgtctgggaggtgtaccaaacagctcattgagaacgggccatgatgacaatggcggttttgtggaatagaaaggggggaaaggtggggaaaagattgagaaatcggatggttgccgtgtctgtgtagaaagaggtagacatgggagacttttcattttgttctgtactaagaaaaattcttcttccttgggatcctgttgatctgtgaccttgcccccaaccctgtgctctctgaaacatgtgctgtgtccactcagggttgaatggattaagggtggtgcaagatgtgctttgttaaacagatgcttgaaggcagcatgctccttaagagtcatcaccactccctaatctcaagtacccagggacacaaacactgcggaaggccgcagggtcctctgcctaggaaaaccagagacctctgttcacttgtttatctgctgaccttccctccactattgtcctgtgaccctgccaaatccccctctgcgagaaacacccaagaatgatcaattaaaaaaaaaaaagaaaaaaaaatattttgtacagaggagctcttgctatattgccaaagctggtctcaaactcctggcctcaagtgatccttcggcctgggcctgtcaaagtgccggaataatagatgtgtctcactcactcttgccctggctgtaatgcagtggcatgatcttggctcactgcaacctccacctcccagattcaagcgattctcgtgcctcagcctccccagcagctgggattacaagtgtgcaccaccatgcctggctaatttttgtatttttagtagacacagggtttcaccataatggccaagctggtctctaactcctgacctaaagtgatcctcccgtctcagcctcccaaaatgttaggattacaggtgtgagccaaccgcacccagtaaaagttcaattttaatcaccattttagagatgatgatacagaaacagtgtggcagtgactcaacctgttaatccccagcactttcaaaggccaaagaagggggattgtaggggtgcgagatcagcctgggcaacaaagcaagaccccgtggctacaaaacaaaatttctttctttttttttttttcttttgagatagagtcttgctcttgtcgcccaggctggagtgcaacggcacgatcttggctcactgcaatctccgcttcccaggttcaagcaattctccagccttagcctcccatgtagctgtgattacaggcacccaccaccacgcccggctaatttttttgtatttttatttttatttatttatttttgagatgaagtctcgctctgttgcccaggctggagtgcagtggcatgatctcaactcacgacaacctccgcctcccgggctcaagcaattctcctgcctcagcctcccaagtagctgggactacaggctcgcgccacaatgcctggctaatttttgtatttttagtagagacgagggttcactatgttggccacgctggtctggaactcctgacctcatgatccgcccacaccggcctcccaaagtgctgggattacaggtgtgggccatcgcacccggccaaaacaaaatttttcatcctcctgacatggtggtgcacgcctgtagttccagctacttggaaggctgaggtgggaggatcacttgaacccaggaggtcgagactgcagcaagctatgatcatgccactgcactccagcctgggcaacagagcaagaaggtgtacagacaggataatatagtaaaaaaagggagcaggaggctcatttagagaccctagatccagggcagttacctctgaggaaatgacatttgagctgacatgtgaaaaataagaagggttgggcacggtggctcatgcctgtaatcccagcagtttgggaggccgaggcaggcagatcacctgaggtcaggagttcgagaccagcctggccaacacggtgaaaccttgtttctactaaaaatacaaaaattagctaggcatagtggcatgcacttgtaatcccagctacttgggaggctgtggcaggagaattgcttgaaccagggaggtgaaggttgcagtgagcagagaccacaccattgcactccagcctgggtgacagaatgagacttcatctcacaaaaaaagaaagaacaaaaaaaaaaaaaaaaagaaagaaagaaaaagaaaaacaagaaggaagcagttatgcctggagttgggaggcaggggatttctaggcagaggaaacagcaagtgcaaaagtcccgaggttggtttgagtttagcatattcctggggcaaccagaaggttgatgacgatgaagctgtggagagataggggaagggggggatgcgaggccagggaggctatgggccttccatatcttgcagggcctcaaaggctgggggaagactttggcagtttgtcactgtatcctccacaagccacagtgaggccacagatataaattatatatgagtggccaggccacgcctgtaatcccagcattttgggaggccgaggtgggtggatcacttgaggtcaggagttccagaccagcctggccaatatggcgaaaccctatctctactaaaaatacaaaaattagccaggcatagtggagcatgcctgtaatcccagctattcagaaggctgagacaggagaattgcttgaaccctggaggcagaggttgcactgagccaagatggtgcccctggactccagcctgggcgacagagcaacactctgtctcaaaaaagaaaaaaaaattatacgtgagtacaatgcctagcacacaatgaggcatcaatgatgggccgggcacagtggcatgtgtttgtagtcccagctacttgagaggctaaggtgggaggatctgttgagctcacgagtttgggctgtagtccactatggcaattaggtgtctgcactcagttcagcattaatacggtaccccttggagtgggggaccaccagttgcttaaggaggggtgaactggcccaggtcagaaagggaatagggcaaaactcccatgctgatcagtagtgggatcccgcctgtgaatagccactgcactccagtctgggcaacatggcgagaacctatctcataaaaagtaaaaaacaggggctgggtgcagtggctcatgcctgtaatcctaacactttgggaggctgaggcaggtggatcacgaggtcaggagatcaagaccagcctggccaacatagtgaaaacccatcctaaaaatacaaaaaattagcagggcgtggtggtatgtgcctgtaatcccagctactcaggaggcagaggcagaagaatcgcttgaaccagggaggtggaggttgcagtgagtggagattgcgccactgcactccagcctgggcgacagagcaagacatcatctaaaaaaaacaaaaaaacaaaagtaataaataggactgggtatggtggctcacatctatactttcagcactttgggaggcctaagcccagaaggatcacttgaggccaggaatttgagaccagcctaggcaatatagcgagagctcctctctacaaaatatttaaaaattagctgggcttactttttttttttttttttttttttttttttgagatggagttttgctcttgttgcccaggctggagtgcaatggtgcaatctctgctcactgcaatctccacctcctgggtccaagcgattcacctgcctcagcctcccaagtagctgggattacaggcacgtgcaaccatgctcggctaatttttgtatttttagtagagacgggggttttactatgttggccaggctgctctcgaactgctgacctcaggtggtccacccaccttggcctctcaaagtgctgggattataagcgtgagccaccgtgcctggccagttgggcttacttcttgttgaacaggtctaaaaaaagaaaaataggcaggcatggtagctcatgcatgtagctccagttacttgggaggctgaggctggaggatcacttgagcccaggagttcgaggctgttgtgagctaggatggcaccactgcactccattctgggtggcatagtgaaaccccatctttttttttgagacggagtctcgctctgtctccgaggctggagtgcagtggcgcgatctcggctcactacaagctccgcctcccgggttcccgccattctcctgcctcagcctctcgagtagctgggactacaggcgccggccaccgcgcccggctaatttgttttttgtagtttttagtagagacagggtttcaccgtgttagccaggatggtctcgatttcctgacctcgtgatccacccgcctcggcctcccaaagtgagaccgagcgcccggccgtgagacccccatctcttaaaaaataataaataaataggccgggtgcggtggctcacgcctgtaatcccagcactttgggaggccgaggcgggcagatcacgagggcaggagatcgagactatcctggctaacacggtgaaatcccgtctttactaaaaaaaaaaaaaatacaaaaaattagccgggtgtggtggcgggccctgtagtcccagctattcgggaggctgaggcaggagaatggcgtgaacccaggaggcggagcttgcagtgagccgagattgcaccactgcactccagcctgggcgatacagcgagactctgtctcaaataaataaataaataaataaataaataaataaataaataaaataaacaaataaaaaatcaatgatgggttcaaagtgatgaccaaaatagccgtgggtccttatcctcccacgatcaccgctaattgtgttactggtagaaacaacgcgggaggttttctgccgcccaaatcaccactaattgtgttactgatagaaacaacgcaggaggttttctgccgcccaaatcacgcttctcccacccgccaatcctcttgagctcagattctaggagaggggaagtcagacacccagatacagaattctgaagcaggctgcaaagtgttaagggctgttactggggtgtcccgagaggaccgtggaggcccaggggaattcagatccatgggctccatatggtgcgggaggaggagggaggagagccaggcacagggatttagcttgatgagttatgggaggtgggagatgacacacaaagatgagtcagacctagtccttgcccttgaggggctcccagcctcagtgcagggaccactgtcagggtccatgcgagctaagtgatcttggcttggtttttcctcctctgcaaaacgggagtcatcccagcccccacttcccaggggagcagagcaggttgaatgggctcatgctgataaagtgcccagcacagtggtttgggggtacaggtaacggagctggtttgatgacaagtgctttcgcagggaggtgtcaaggatgtgggagataggcgtggggagagggcggctctgtctgaggagggggtgcgggcaggcagggctcacagtctctgtctttctgcctccaggtttccttctccctaaggcttttcgctctcatctctatctctgtttttcttcatgtttctgtatagaaattggatttcatcctagtactttgggaggccgaggcaggcggatcacctgaggtcaggagttcgagaccagcctgatcaacatgcagaaaccccgtctctactaaaaatacaaaattgctgggcgtggtggctcaagcctggaatcccagcacttctggaggccaaggcgggcggatcacaaggtcaggagatcaagaccatcctggccaacacggtgaaacactgtctctattaaaaatacaaaaaattagccgggtgtggtggagggcacctatagtcccagctactcgggaggctgagcaggagaatggcatgaacccggaaggcggagcttgcagtgagccgagattgcgccactgcactcaggagacagagcgagaccctgtctcaaaaaaaaaaaaaaaaagaaaaagacaaaaagaaattagctgggcctggtggcgcatgcctgtaatcccagctacttgggaggctgaggcaggagaatttcttgaacccaggaggcagatggtgagctgagatcgcaccattgcactccagcctgggcaacaagagtgagactctgtcttaaaaaaaaagaaaagaaaaagaaattggatttcaaagttaactggccaagtgtggtggctcatgcctgtaatcccagcactttgggaggccgaggcaggcagatcacctgaggtcaggagtttgagaccagcctggccaacatggtgaaaccccgtctctactaaaaatacaaaaattagcctgatgtggtggtgggcacctgtaatccttgctactggggaggatgaggcaagagaattgcttgaacccaggaggtggaggttgtagtaagccaagattgcaccactgcattcagtgagccaagatcgtgcctatgcacgccagccagggcaatagaatgagactccttctcaaaagacaacccgggtcctgatttcaacacctatgagacatgtcaccctgatcaagttacttcccttctctgggcctcagtttccctatccagaaaatggggataatataacacctctgctataggtctgttatgagaagggacatatagatgtgtaaaatatccaatatggtggccattagtattattattactgatactaatctcagactctgtttttctctcagcatctcttttttacatttatttatttatttatttatttatttacttgagatggagtctcactctgtcgtccaggctggagtgcagtggtgtgatctcggctcactacaaactctgcctcccaggttcaagcaattctctagcctcaggcttcccagtacctgggattacaagcccgccaccacgcccggctaattttttgtatttttagtagagacagggttttaccatcttggccaggctggtcttaaactcctgacctcatgatccaccagcctcggcctcccaaagtgctgggattacaggcgtgagccaccgcacctggctactttctttcattctttcattttttgtttgtttgttttttgagacagaatctcgctctattgcccaggttggagtgcagtggtgcaatcatggcccacagcagcctcaacctcttaggctcaagtgatcctcctgcctcacccttctgagtatctgggactacacgaacgagcagccgtgctttgctaatttttaaaaattttttttgtagagacagagtctcactatgttgcccaggctggtctcgaactccggggctcaagcgatcctcccatcccagcctcccaaagtgctgggattacaggtgtgagccaccatgcctggcctctttctttgtgtttctctctctacgtctcattctgtcagctcgtccccctacttgggtttatgtttgagctgggagcttcacaaagccagagcaagagctgtcccagtcaccagggtccccagcattgccaagctcatagcctggcatgtaacaaacgtccagtaaaatgcattgaactctgacctctgctgaaccaatgttgggcaatgctggagacacagcagtgactgagacagccccagtcctgccctcatagggcacatagtgttgggcacggtggctcacgcctataatcccagcactttgggaaactgaggcggtggatctctttttttttttttttttttttttgagatggagttttgctcttgttgcccaggctggagtgcagtggcgcgatctcggctcaccacaacctccgcctcctgggttcaagtgattctcctgtatcagcctcctgagtagctgggattgtaggcgcacgccaccacacccagctaattttttgtatttttagtagagacagggtttcatcatcttggccaggctggtctcgaactcctgatctcaggtgatccacccacctcggcctcccaaagcgctaggattacaggtgtgagccactgcacccggactggatctctctctctctttttttttttttttgagatagagtcttgcactcactatcgcccaggctggagtgcagtggtgcgatctcggctcactgcaagctctgcctcctgggttcatgccattctcctgcctcagcctccccagcaggtgggactacaggcgcccgccaccacgcccagctaattttttcatatttttagtagagagagggtttcactgtgttagccaggatggtctcaatctcctgacctcgtgatccgcccacctcggcctcccaaagtgctgggattacaggcgtcagccactgcgcccagccaactggatctcttttttatgttttgttttattttgttttgagacagggtctcactgtcacccaggctggagtgcagtggcatcatcttggctcactgtagcctggacctccggggctcaagcaatcctcccatctcagcctcccaactagctgggactacaggcatgcaccaccacgccattaatttttcgtattttttgtagagatagggtttcacgatgttgcccaggctggtctccaactcctgggctcaagcaatccacccaccttggcctcccaaagtgctgggattacagctgtgagctacaactcctagccaagaggctttctttaggacaggagttcaagaccagcctgggcaacagagtgagaccccatctctaaaaaaaaaataaaaatatagccgagcgtggtggaggccacctgtaaacccagccactcagcaggctgaggcatgagaatcgcgtgaacccaggaagcagaggttgcagtaagccgagatcgtgcactctagcctgggtgacagagcaaaatcccatctcaaaaaatcataataattaaacaaacaaataaataaattagctgcactttgtggcctgtgcctgtagtcctagctactggggaggctgaggtgggaggatcattgagcccaggaggtcaaagctgcagtgagccatgattgtatcactccactccagtctggacgacagagcaagacgctgctcgaaaaaaaaaaaaaaaatagcctagagggaaaggcctaggtttgcctgctctccctgaggcttgaaaaggggcttaggggcttgctgagcactaccagggagcaatcagggacccctacaagtttgaatctttcaattgatccttcccagggctggcggtttacactgggttttggagccgtctctagggccccagctgagagcccctctgctggcctctgaggccctggagcccccacctccccctcccgcatgagattatgtcaacatagcccagacgcttctggccaggacaatatttgccctcaggatctggggaggtcgctatggagatgtgccctcccagactaggctggaagacgccgaggggagccatgcgtctctgtctcacggagtctgacttaatccctgttctcttctgggatataagtccctctctctgttttcgtccctctctgttcccctcctttccctttccttcccctctcctccccttccctctccctgtctctctctccttttttttttttttttttttttttgagatagggtctcactctgtcacccaggctggagtgtagtggcgtgacctccgcctcccgggctcaagccatcctcccacctcagcctccccagcagctgggaccacaggtgcgtgccaccatgcccagctaatatttttttgtagagatgcagttttgccacattgttcaggctggtctctaactcctgagctcaagcgatctgtctgcctcatcctgcgatctcggatcagtgcaacctccacctcccgggttcaagtgattctcctgtctcagcctcccgagtagctgggattacaggtgcccgccaccacacccggctaattttttaatttttagtagagacgaggtttcaccatgttggccaggctggtctcgaactcctgacctcaggtgatccacctgcctcggcctcccaaagtgctggtattacaggtgtgagccaccacgcccagccttgtttcttaggtcttatctctctgggtgtcctctctgtccctctttctctgggtccccatctctgtgtttctgtctctccgtgtctctgtctctccttgggtttcatgtctgtgtctctctttgggtctctatattttttgtttgtttctccaggcctctgtctcgggatctctgtctcttcccatctctggactcccctctctctggttcacatccgtttgtctgtgtgtgcctggacccacatctctcgccaggtctctgtctcagctctgctgtctctctcactctctgtatctcttctctttctgtgtatgtgtgtgtctctgtgtatctgtcattcaggcctcatctctctgcagtcctgaatctccgagatggagagggggctgtcacagcttcccattcctggtctctgtccccacggggtgccccctctccccatctctctctgcctcatttctctggcaccatctgccagcaccccaggcccccgcctgctccccgcagggtctgcttagccaggcagccccatgtggggagacacaggccttgcagcttccaccccacccttgcatcctggacaggggcactgcctggtcattgctggagggccgggggaggcaggagtgcaggagaccagagccaggagaccagggaccaggggcaatggatagaaacagacgcaatcccagagaggagatggaaaaaggggaagagaaaggagaaactttaaagactggcaaaatgaggctaatccagagggagagagagagagtgaaagaacccagcagagaggcagaatgaaacatggaaaaagagaagagaaaagccttcccaacagacaggagaggaagacagaggcaaactgagtgtgggctcagagaaaaggagtaaagaggcagggcacagtggtgcacacctgtaatcccagcactttgggaggctgaggcagatgaatcacttgagcccagaagttcaagaccagcctggacaacatagcgagacaccacctctacaaaaagtacaaaaattggctgggcaccatggttcacacctgtaatcccagcactttgagaggccaaggcaggtgaatcacctgaggccaggagttcgagaccagcctggccaacatggtgaaatcccatctctacgaaaaatacaaaattagttgggcatggtaggcacatgctgtaatcccagatacctgggaggctgaggcacgagaatctcttgaacccgggaagtggaggttgcagtgagccgagatggcaccactacactccagcctgggtgacagagacaaactccatctcaaaaaaacaaaaacaaacaaaccaaaaggctggacacgtaatcccagcactttgggaagccgaggcgggctgatcatgaggtcaggagtttgagaccagcctggccaacacagtgaaacgccgtctctactaaaaaaaatacaaagaattagctaggcatggtggcaggcgcctgtaatcccagctacttgggaggctgaggcaggagaatcgcttgaacctgggaggtggaggttgcagtgagctgagatcgcaccagggaactccagcccgggcgacagtgtgagactccgtctcaaacaacaacaacaacaaaaattagccaggtatggtggcatgcgtctgtggtcccaactactcaggaggctgaggtgggaggattgcttgaacccaggtaggggggtcgaggctgcgttaagctgtgatcactctactgtgctccagcctaggcaacagagggagaacctgtctcaaaagaaaagaagaggagtgaggagatatttggatgaaagagagaaacaaggtaggatggacagaaagagagagagacattgggtcagggaaggtgggagagagatgggagaggcagaggggttgtaggagaggttttgctaaacaagactagagacggaaaatggagatccatcggggtgggtgtggaaaggctggggaatgaggctcctctggttctgagtcccctgttgcgggagtggggcgtggaactcagctgtctgggaggggctgagttgggatggtgcatgctgtttctcggcctgaagttttcagaagccatgagcaacgcagctggagggagcctgtgcagccagcccctttgcagacgctgggagacaacagaggaccccaggagggctgaggtgggcagaagaccaggcatctacccacccctgactcctcatcctgtcttcagaagtctcactctgatgcccagcgctgtggtgcagtctcagctcactgcaatctctgcctcccaggttcaagtgattctcccacctcaatctcccgagcagctgggattacaggcacgcgccactacacccagctaacttttgtattttagtagaaatggagtttcaccatgttggtcaggctggtctcgaactcctgacctcggtctcccaaagtgctgggattacaggcgtgagccacggcacctagcctctcctcttttcttttcccttccctcccctcccctcccctgcccttcttttcttttgagacagggtctccctctgttgccgaggctggagtatagtggtatgatcacagctcactgcagcctcgaccccctccccgggctcaagcaattttcactcagcctttccatctcgcagtttcttttctggattttttttttttttttttttttttagatggagtcttgctctgtcgcccaggctggagtgcagtggcgcgatctcagctcactgcaagctccacctcccgggttcacgccattctcctgcctcagcctcctgagtagctgggactacaggcgcccgccaccacacccggctaattttttgttttttagtagagacggggtttcaccgtgttagctaggatggtctcgatctcctgacctcgtgatccacccgcctcggcctcccaaagtgttgggattacaggcgtgagctaccgcaccaggccttttctggttatttatttatttaattttttgagacggagtctcgctctgttgcccaggctggagtgcagtggcgcgatctcggctcactgcaagctctgcctcccgggttcatgctattctcctgcctctgcctcccaagtagctgggactacaggcgcccaccaccatgcctggctaattttttgtatttttagtagagacggggtttcaccgtgttagctaggatggtctcgatctcctgacctcatgatccacccgcctcggcctcccaaagtgctgggattacaggcgtgagccaccgcgcccggccctggttatttttttgagacagtctggctctgtcgcccaggctggagtgcagaggcacgatctcagctcactgctacctctgcctcccgggttcaagcgattctcctgcctcagcctcccgagtagctaggactacaggcgcccaccaccacgcccggctaatttttgtatttttagtagagccggggtttcgtcatgttggccaggctggtctccaacttgtgacctcaggtgatccagccacctcggcctcccagggctctggaattacaggtgtgacccaccgcgcctctctgtctctctccggctcagtccctgttttctctttcttggcttctctccctcaccccctcttatctgtgtctgtgttgtctgtttgtctctgtgtgtgtttctctctgtcgctgtctctctctgtctctctctccccctctctctctctctctctctgtttcttctagtctctctcttgtagtctctctctcttggtctttctcttcttgcttttttttttttttttttttttttttgagacagagtcttgctctgtcgcccaggctggagtttagtggcacaatctcagttcactgcaacctccgcctcctaggttcaagcaattatcctgcctcagtctccccaacagctgggattacaggtgtgcaccaccacacccagttaatttttgtattttagtagagacatggtttcactatgttgtccaggctggtctcaaactcttgacctcaggtgatccgcccgccttggcctcccaaagtgttgggattacaggcatgagccactgtgtctggcctctcttcttgtctttatctgcctcccactctagatctttcttggtccttgatttctttttttttttttttttttttttttttgagacaggatctcactctgtcacccaggctggagtgcagttacgcgatcatcacagctcactgcagcctcaatttcctgagctcaagcaaatcctcctgcctcagccatccaagtagctgggaccacaggcgcaccaccaccatgcctggctaattaaaaaaaaaaatgttgagaggccgggcgcggtggctcacgcctgtaatcccagcactttggaaagccgagatgggcagatcacctgcagtcaggagttcgaaaccagccatggctaacatggtgaaaccccatttctactaagaatacaaaaacttagctgggcatggtggtgcgcacctgtaatcccagctacttgggaggcggaggcaggagaatcacttgaacccaggaggcagatgttgccgtgagccgagatcgtgccattgcactccagcttgggcaacaagagcaaaactccatctcaaaaaaaaaaaaaaattggccaggcgcagtggctcatgcctataatcccagcactgtgggaggctgaggcaggccaatcacctgaagtcaggagttcaagaccagcctgaccaatttggtgaaaacccaactctgctaaaagtacaaaaaaaaaaaaatagccaggcatggtggcaggtgcctgtaatcccagcctctcgggaggctgaggcaggagaatcacttgaacctggctcactgcaatctctgccctagcctgggcgacagagtgaaactctgtctcaaaaaaaacaaaaattttgtttttaattctagatgacgtgttgatagatgcagcaaaccaccatggcatatgcatacctatgtaacaaacctgtacgttcagcacatgtatcccagaacttaaggtaaatttttttttttaattggaaaactgaaaaaaaaaaatattttttttttagagacgggatctggctatgttgcccaggctggtctccaactcctgggcttaagtgatcctcccatgttggcctcccaaagtgctgggattacaggtgtaagccaccacactaggctcttagctccttttcctgtttcacaccaccagctcatttcctctccactgcttccccctccctgccagcctctcccttccccctctacagcctccccacccctcactgccttcctctgtggagtgacctcaggccctcattggggccaaggagagactcccttccaacctaaacttctcccaaggtgctgggcaatctcagacccccttccctctccactccaggacaggagcctttcccaggacccggagggcaccaggaatgtggggcagagagcggggaggcagcctaagtccaggaagcgagaaccctcgcctcccccgagacttgtctccttccagcctctggtgcagacctcatgccaccccttactccctgtccctcctggggcctctgggccttaatttctcctctacaaaatgggcagactcgcctctgtcccacttagagtcccaggggagtgcatgctcacaaatgtccattgtatgattaatgtgcaggaattggagtttgtattaacaggagatgagagctgggagctgggactgggctctgagcctgtcccccacccccagtcacgtacagatgttccccatatttagggcaaaggaacagactggaagtagagacagcagagaatgtgtgtgattcactggcgactgtcatgatgagaccatgtgaggctatgggttagtgtgcaattgtgacacgatggtgtgtgtgaccctgtgtgcacctgtgtgactgtgcgtgactgtgggaggtgggattgcagggtgtgacaagtcactgtgacgtgcacagctatgggacagtgaggttgtgtgcgtgacatgtatatgactgtatgtgacttgtgaatatgggtgagactaagggagagttgtgagtctgtatgaccatgtcactcagtgtgaccgtgggggtgagggtgacggtgtgagagtgtttgcctcatgacagttggggaatgtgtgttgttggaatgtgactgaggactctgtgggtgactgtgaagtgtgtgagtgtgtgacggtgttaatgggtgtggttgcatgacattgtgtgtgactttcagcttgtgtcataaaaagactgtataataagacattaaaaaaaaaaaaggccaggcgcggtggctcatgcctgtaatcccagcactttgggaggccgagacgggtggatcacgagatcaggagatcgagaccatcctggctaacacggtgaaaccccgtctctactaaaaatacaaaaaattagccgggcatggtggcgggcacctgtactcccagctactcgggaggctgaagcaggagaatggcgtgaacctgggaggcgaggcttgcagtgagctgagatcacgccactgcactccagcctgagtgacacagcaagactctgtctcaaaaaaaaaaaagagtcgggcacagtggctcatgcctgtgattccagcactttgggaggctgaggcaggcagatcacctgaagtcaggaatttgagaccagcctggccaacatagtgaaaccccatctcttctaaaaaaaaaaaaaaaaaaaaaagccagccacagtggctcacgcctgtaatcccagcactttgggagactgaggcgggaggatcacgaggtcaggagttcaagaccagcctggccaacatggtgaaaacttgtctctactaaaaatacaaaaattagctgggcatggtggcgcgtgcctgtaatcccagctacccgggaggctgaggcaggataattgcttgaaccaggacccgggaggtggagattgcagtgagccaagatcacgccactgtactccagcctgggctacagagggagactcggccaaaaaaaaaaaaaaaattattagccgggcatggttgcgggcgcctgtaatcccagctacttgggaggctaagacaggagaactgcttgaacctgggaagcagaggttccagtgagctgagatcgtgccactgcactccagcctgggcgacagagtgagactccatcccaagaaagaaagagagaaagggagaaagggaggaagggaggggggaggggagaggggagaggggagaggaaaaggaaaggaaagtcctttgcagcaacacagatgcagctggaggccagtatcctaagtgaattaacaaaggaacagaaatccaaacaccagatgctcttacttataagtgggagctgagcactgggtacacatggacaccaacatgcgaacaacagacactggggactcctagagggggcagggaaggagacaagggttaaaaaactacccgttgggtgccatgctcactacctggatgatgggatcatttatacccccaacctccgcatcgtgcaatacacccccgtgacaaacctgcacatgtgccccctgaatctaaaataaaagttaaggccaggcgcggtggttcatacctgtaatcccagcactttgggaggccaaggcgggaggatcacttgaggccaggagttggagaacaatatggccaacatggtgaaacctcatctctactaaaaatataaaaatcagccaggcgtggtggcatacacctgtagtcccagctactctggtggttgaggcatgagaatcgcctgaacccaagaggcagaggttgccaagttggcgccactgcactccagcctgggtgacagagtgagaccctgtctagaaaaaataataaataaaatgaattaaaataaatgaataaataaataaataaaagttgaggctgggtgtgatggcacatccctgtagtcccagcactttgggaggccgaggcaggaggattgcttgaggccaagagttggagaccagcatggccaacatggtgaaaccccatctctactaaaaatacaaaaattttagctgggtgtggtggcacacacctgtagtcccagctactcgggaggctgaggcaggagaatctcctgaaccctggaggcggaggttgaagtgagccaagatggcgccactgcactccatcctgggtgacagagtgagaccctgtctcaaaaaaaaaaaagttgaaattattttttaataaaatggtggggcatggtggctcatgcccatagtcccagctagtcaagaggctgagttaagaggatcccttgagcccaggaagtggaggctgcagtgagctataattgttccagtgcactccactctcataaataaataaataaataaaatgtaaaaaggattgtatgggccgggtgtggtggctgtcgcctgtaatcccaccactttggaaggccaagacatgtggaacacctgaggtcaggagtttgagaccagcctgggcaacatggtgaaacaccgtctctactaaaaatacaaaaattagtcggttgtggtggtgtgtgcctggaatcccagctacttgggaggctgcggtgggagaattgcttgaacccaggaggcggaggttgcagtgagctgagatcatgcttctgtactccagcctcagcaacagaggaagactctgtctcaaaaaaaaaaaattctatgtctgcgagtaaccacacaactgcatactgcgtatatttatttcatgacaatccttccttgaacccctgctcttaacgattttggggacccagtggtgacccagatgtcctggctctaccctcctgggccacacaggctagcagggcaacagtgtttgtgatgaaacccggtgattgcgtgaatgtgtgggtgattgacagtgttgttggaactgtgagacactgtgagcgttactgtgtgtgtgcaggagtccatagccctgggtacatgactgtgtgtcacagtggatgactgtccacctgtgagtgagagactgtggctgtctgggtgtgaccatgggactgtatgggtgtgactgaatgtgtgactgtgtgagtaacagcttgtgaggttctgtgactgtgcctttccatggctcagcctatgggattgtgtgtgacactgcatgtttgattgagtgactgaggctctgggaatgagtggcggtgggggcgggtacctgtgggtgggacagcatgagagattgtacacacttggtgcaggggtcctcaggacgataaggacaattcagtaactgccctccctcatgaccttgatgactgccccctgctcggctctctgccccagagctccccgcttccgttccctgtcccgccttggccccgccccctcccatcaccccgggctgccagcgcctgtcacctctcccagagccgagacaaggcagttggaggcagcggtggcaggggctgcaggagcaagtgaccaggagcaggactggggacaggtgagggctccccaatcccagcccattctccctgcccccccttgacctctcaagtctctggcactctccctctctgcttctctgccctgcctttgtctctctgtctctgtgcccaccaccatctctgctcatctctgtctcttgatgtctctgtctgcgtgtttccatctctggttagctgctagataacttctctttcccctgctctgtctccctccacgtctctgcctcttctttgtctcctagcccacatctgcgtctctttctctgtttgtttttctctggtctctggctgggggtctcattctgtccctccgtctctgcgcctctcagtctttacatttctgtctcttgtgtctgtgacgccgttgtctgtccttctgaggctcgacctgagatcctctctgcttccgtctttctctacgtggagccgcgggggcgcgggtgagtgggtgtcgggcgttagaccgatttccaggcatctgcacatctaaccccggatctgtcgcttctctagtccctaagtatttggatgctgggaaagggttgttccacttactctgggctttatctacccccagcggggaaagttttgtaaggtcaggttcctatgtgtgctagaaaaccctttgggcttggagagtgggagctcggatgggcgtttcaagttctccaccaggctgtgggaactcagatgggcgtttcaagtaccccactagggggtactgaaaaccttcaagtttttcagttccccatagaaaaggggtctaggctgacggtttctaccccctcctctccaaggcggtccccgggttcccaggagtctgtaggtccagacttcggtgacactgacacttccgcccagcgtagctctagggcaaccgcccgctcagcaaacaccccccccttccacctttgctgccccaacaacagtcaggggaggccggggaatcacttaaggggccccgcccaccaccggagttccacccactccgcgtgcctctccctccccccagatcatcacgcctgggagttgcgggagcgggtgcgctgcctcggagtcccgcgtgtatacggctccccagccgtctgcccctgtgtgtgaatccctgaggcggggtgacgctggggttggagtaggagggcagaggtgctgaccttgccctgggaccctccaggcctgatcgcccctgcacgaaccagacccttcgccgccctcacgatgactacctctccgatcctgcagctgctgctgcggctctcactgtgcgggctgctgctccagagggcggaggtgaggaagcgaggagccagaggagctccaggcttggagggaggtatggggacggttttagggcttccgtcgtcagggcgctgtcgctcacgcctgtaatcccagcactttgggaggccgaagcgggtggatcacttgaggccaggagttcgagaccagcctggccaacatggtgaaactccctctctactaaaaaaaatacaaaaattagccgggcgtggtggcggccgcctgtaatcccagctactcggaaggctgaggcaggagaatcgcttgagcccgggaggcagaggttgcggtgagccgagatcgcgccactgcactctaacttgggtgacagagtgagactctgtctcggggtgggggggggaggcttccctcagcgcaaagagagtttcaagactgtcccgcttgcccagattcaagttgttgggtggtggtttgtttgtttgtttcgagacggagtctcactctgtcacccaggctgagatgcagtggcatgatctcggctcactacaacctccgtctcccgggttcaagcgattctcccgcctcagcctctcgagtagctgggactacaggcgcactccaccatgcctggctaatttttggatttttagtagagacggggatttcaccatgttggtcaggctggtctcgaactcctggcctcaagtgatccacccgcttcggcctcccaaagtgctgggattacaggcgtgagccaccgcgcccgggcccagattcgagttttgattatcgtttccactcccttttcttcccccaacaagtcctcctgataatttccagccaccccctccccaattttcttgaaggttttcagtctcccatagcaactccagtgggtggcttccaggcaccccaccccaagacttggaactggtttccaagctacccaagactcccgaacaacacgcaacagaccctcaaagtctctctggggcgcttctgggccacatggacctagcagcctgggagcgggggtcggtctgggggggtcctcccttctttcttttcctagacaggctctaaggggcagacggcgggggagctgtaccagcgctgggaacggtaccgcagggagtgccaggagaccttggcagccgcggaaccgccttcaggtgtgaccaggagggctggggacgcggggaggacctgaggctgagaggggtgggcttgggatgggccttgggctgacgggcggggaagaaatctcggggcgctgtgggctggagaggcccggggactgacctgagcatggtgggaactggggcgggaccacggttcctgggggaggcctgggaggaagcttgaaatgggaggagccttgggcggggcctgcacagaaataaaccttgaagggggcggggtttgggatggagactgggaagggcccttccgggtgggacgatctggggcggggacttgtttggtgggaggagcccagagtggggccgggaggaggggcggagctttgaggctggtgggaggagcttgtggccgagccgggacggaacgccctccgagtgggcggggctagagccgggcttggtgtggccggcggagaagcacttggcccactgcggagaagcacttggcccactgcgcagtagcacttggcccactgcgcagtaggtccactgggcacctggcccccgtgcccacccccaggcctcgcctgtaacgggtccttcgatatgtacgtctgctgggactatgctgcacccaatgccactgcccgtgcgtcctgcccctggtacctgccctggcaccaccatggtgaggtgctccctgggcccggagccctccccagacacaaacaactgctaacctttgcccccagacacctacatccgagtcccacagctcacctgcacccctctcctgctcctctttgccccctactcctttccggcaggctgggtttctcctgtctgtccaaccctgcctatctcacataacgcagcttctctgtctccgtatctctttctatttatttatttggagacggagtctcgctctatcgcccaggctggagtgcagtgggatgaactcggctcactgcaacttccgcctcccgggttcaagcgattctccagcctcagcctcccgagaagccgggattacagaagccgggattacaggcgcgcgccaccacacccggctttttttttatatatatatttttagtacagacagggtttcaccatgttggccaggctggtctcgaactcctaacctcaagtgatccgccggccttggcttcccaaagttctgggattacaggcatgagccaccgcgcccggccaccacaggattcttattttgtctccttttcctgagtctgtcagtctctgggcatcttaacctaactagctatgtcgcctcagacactttatttatttaacctatttttttctttttgagacagagtctggctctgtcacccatgtggtggcagcatcatagttcactgcagcctgggaactcctgggttgaagcgatcctcccgcctcagcctcccaaatagcagggactacaggcgcacgctaacacacccagctaattttttttaaaaaattggcagtgacagagtcttgccatgttacccaggctggtcttaaactcctggcctcaagggatcctctcacctcagcctcccaaagcgctgggattacaggcctatttaacttttgttgtttttgttgttgttgagacagagtctcgctttgttgcaaggctggaatgcagtggcgtgatctcggctcactgtaacctcacctcccgggttcaagcgattctcctgcctcagcctcctgagtagctgggactacaggcgcacgccaccacacccagctaatttttgtatttttagtagagacagggtttcaccatgttggccaggatggtctcgatctcttgaccttgtgatccacctgtcttggcctcccaaagtgctgggattacaggtgtgagccaccacgcccagccttaacattttgtacctcaattttcccatatgtagaactaggttaaggatattactaattccatgggctagtatgaatattaaattaatacaaataacatgccatataagggtttatcatcatcatcatcatcatcatcatcatcaccacttcggctctctccctctctgttattgtctcacagtttgtctttctgtatttatctctttctctgtgtgccttaattccctctcttctttccccacagtggctgcaggtttcgtcctccgccagtgtggcagtgatggccaatggggactttggagagaccatacacaatgtgagaacccagagaagaatgaggcctttctggtaagaagaggtgagggcttcaggttaggagtccagggagagatggaaaggcagtagattcaggcagggcctgaaaccccttggactgttcagacctctgggttgtaagtgagagaaactcaactcagacttgcttcaaagagagaaagatgtactgccttctgtgatggaaaagaataagatggccgggtggtgtggctcacgcctgtaatcccagcactttgggaggccaaggagggtggatcacttgaggtcaggagtttgagaccagcctggccaacatgtcaaaaccccgtctttactaaaaatacaaaaattagctgggcatggtggtatgcacctgtagtcccagctactcagagggctgagacatgagaattgcttgaacccaggaggcagaggttgcagtgagccaagatcgtgccactgcactccagcctgagtaacagagcgagactccatctcaaaaaaaaaaaaaaaaaaaaaaaagaatgctgtagttgggccaaggtcaatggctcatgcctataattccaacactttgagaagatgattgcttgaacgcaggattttgagaccagcctgggtaacatagtgaaactccatctctacaaaaaatataaaaatttggccaggagtggtggctcatgcctgtaatcccagcactttgggaggccaaggcgggcggatcacgaggtcaagagattgagaccattctggccaacatggtgaaaccccgtctctactaaaaatacaaaaattagctgggcatggtggcacgcacctgtagttccagctactctggaggctggggtgggaggatcgcttgggccctggggggcgaggctgcagggaaccatgatcctgccagagcactccagcctgggcaacaaagcaagaccatgtctcaaaaaaaaaaaaatctctggttggctggtcacatgcctcgtgccctggagctgaagggtggagtcagcccttctcaaataagggtaagcagttccccaagataaaatagggtatttgggcagaaacaaagagcagaggtccttccagtctctctctgggcctggggcttcgagccaagccttgttcccttccccttcttgccccgaccaggaccaaaggctcatcttggagcggttgcaggtcatgtacactgtcggctactccctgtctctcgccacactgctgctagccctgctcatcttgagtttgttcaggtgggaccttaaccctgagtggtggcggcagagatgtgagctcggcctcagtttgtccagtaagatggggtggtctgtttccaccaggtccagctatccactggtggttctatggggagcagtgggggtggttaaaggagctctgtgtggccgggagcggtggctgatgcctgtaatcccagctctttgggatgccaaggcaggaggatcgcttgagcccaggagtttgagatcaggctgggcaatatagtgaaaccttgtctctacgacaaataaaattagctaggcatactggtggtgcacctgtggtaccagctataggggggcgctgagacaggaggattgcttgagctcaggaggttgaggctgcagtgagccctgattgtgtcactgcattctagcctgggtgacagagtgagaccctgtttaaaaaaaaaaatagaactctgtgtggctgaggacagctctccaggggcccccacactgccttccaaattcccctaggcggctacattgcactagaaactatatccacatcaacctgttcacgtctttcatgctgcgagctgcggccattctcagccgagaccgtctgctacctcgacctggcccctaccttggggaccaggcccttgcgctgtggaaccaggtgggcatcctccttccgttcctccaaatgggaatcttgcttctctggtgggaccaggaagttctcagtccatttcctatctcctacactctccacagtttatctgagttgggagggtccctctccaaatgtgtcttggggtgggggatcaagacacatttggagagggaacctcccaactcggcctctgccatcatttaactctcccagcctatcactcccatactggaattttccgttcctctccctcattatttcacccatcattgaactttttcaccaatgagagaatccacctgctggcggtgaggcatggcaggatacgagaaagtaagtgggggtggggatgtggcaggtgccagtttgttactaggagacagggtgggagagactagagtctgggagcagacgtggtaagaactaacttgttgaaagttggaccataccaattgttaagaagccgcacgcacccaggcacagtggctcacatctgtaatcccagcactttgggaggccaagacgggcagatcacgaggccaggagttcaagatcagcctggccaatatggtgaaaccctgtctctactaaaaatacaaaaattagctgggtgtggtggcggacacctgtaatcccagctactcaggaggctgaggcagaagaattgcttgaacccaggagacagaggttgcagtgagctgagattgcgccactgcactccagcctgggtgacagagcaagactccatcgcaaaaaaaaaaaaaaaaaaaaagccatagcgtggcccggcagtggctcatgcctgtaatcccagcactttgggaggctgaggtgggcagatcgctttttgcccaggagttcaagaccagcctgggtaacatagcaaaaccccacctctacaaaaacatacaaaaattagccaggcatggcggccctcgcctgtactcccagctacttgggaggctgagatggtaggatcacttgagtccatcaggtcgaggctgcagtgagctgtgatgctgtgatagtgccagtgcaatctggcgaaagattgagaccctgtttcaaaaaaataaaatgaaataaaataaaataagaggggccaggcacagtggctcatgcctgtaatccaagcactttgggaggacgaggaaggcaggacacaaggtcaggagttcaagaccagcctgaccaacatagtgaaaccccgtctctactaaaaatacaaaaattagctgggcatggggcacatgcctgtagtcccagctactcaggaggctgaggtaggagaatcacttgaacctgggaggcagagattgcagtgagccgagatcgtgccattgcgctccagcctgggcgacagagcaaggctccgtctaaaaaaaaaaaaaaaaaaaagaggaagccatagggcaggagagtccataatgtgggtactggcagggagttcagttcttagaaggagctggggtgaccagtgacagaggtcacattttggggatctaggggggaactgacggcaatgatggaagataccaattattttttgttttgtttttgtttgttttgtttctttgagatggagtctcaaaaaagaagctgatttttttttttttttttttttttttgagacggagtctccctctgtcgctcaggctggagtgcagtggtgcaatctcggctcaccgcaacctccacctcccgggttcaagcgattctcctgcatcagcttcccgagtagctgggattacaggcgcctgccaccacacctggctaatttttgtatttttagcagagacagggtttcaccatgttggccaggctggtcaccaactcctgacttcaggtgatccgcccacctcggcctcctaaagtgctgggattacaggcgtgagccaccgcgccctaccagataccaattgttaaggggttcagagtgggagagtccatacagggaaagggaatagggtgagagaaaccaatcacagataccattcactggggacacagagtggaagaacctttgatggcaagagacggggtggaagggcgatcaaagctgggggagactgggagacacccgggcagcgctgactacccctctaccggtctggcccctccctaggccctcgctgcctgccgcacggcccagatcgtgacccagtactgcgtgggtgccaactacacgtggctgctggtggagggcgtctacctgcacagtctcctggtgctcgtgggaggctccgaggagggccacttccgctactacctgctcctcggctggggtgagctccgatcccgtcccccgcccaacccagcgcgcctctcctcggctcccccaactgccctgctggttggcctctgcgggtctcctcccgtctctaggcttctgccttccccaccccgacagaggaattccgcgggtcttgggcctggcggggcccgtgagcgcgctgacagctgcggcggggtgggggggcggggtcggggtctgcacaggggcccccgcgcttttcgtcattccctgggtgatcgtcaggtacctgtacgagaacacgcagtgagttgcagggtctggggcggggcgtgggaggtgggcggggctttgagggactgtggcgggttgtgatggacatgtgggcagggtcggaaggctattcggtgctggggatacgtgggcgggatccgaagtaatggggagctaggaaaggttgtgttccagggcaatcggcaaggggagggggtggggcctggatcgtaatgggcgggaccttagagaatgtgtgtggtctcaagtgcggtgggcggggcctagcgagcaaatgagcttggtgatcggtgagtctagagtttttctatctcttagctctactccgccttccccaggtgctgggagcgcaacgaagtcaaggccatttggtggattatacggacccccatcctcatgaccatcttggtaggatcggtcccgcctccaccaggccgccctcagggatttcccattctgggaagtgggctgccacctcctcctgccccttcagaatgggatcgcggctggctcagcccttatctctccccacagattaatttcctcatttttatccgcattcttggcattctcctgtccaagctgaggacacggcaaatgcgctgccgggattaccggctgaggtgagggcatgcgttggggaccgaggggaaggggccgggtgcgagatggggaaccagggctgcgggatcactgctgccgccctctctccccaggctggctcgctccacgctgacgctggtgcccctgctgggtgtccacgaggtggtgtttgctcccgtgacagaggaacaggcccggggcgccctgcgcttcgccaagctcggctttgagatcttcctcagctccttccaggtgctcaggcagggtgcaggggctccatccttccacccagggcctcctccccagaggggcacgaaagctacagtcgttctctggtgcagccactgaatggggtgggaagatgggatttagttcgttcattaattaattcattcttttttttttttgagacggattctcgccctgtcgcccaggctggagtacagtggcgcgatctcggttcattgcagcctctgactcccgggttcaagcgattctcctgcctcagcctctagagtagctgggattacaggaatgtgcgacaacacctggctaattttgtatttttagtagaggcggggtttcaccatgttggccaggctggtctccaactcctaaccttgggtagtccacccgcctcggcctcccaaagtgctgggattacaggcgtgagccatggcgcccagcccgttcattcattcgatacaaaatactgagctaggactgtcctgggctgtggggagcagcagggaccaggacaggagattggcggccccagcagtgctgcctgctagtgaagagtgagggcttcgaagctggacacagctgaggccaaattcaggttctgtcactttctagctgtttgccagctgtgtggccttcacctcagggttgagggtagggagaggtaagtgaggtgccaacgtgcagaatctaaggaaagattcattccaaaattgaaggcccaccttacacttgcttggtttacctgagtccccaacctgcttcacctcattcggcctgttttctcatctctaaagtggggaaaatactagtctcagtggacaaggctgttcattcattaaattcagcaaaaaattactgagcatgtgtatatgctaagcactcctccaggcttatcacaggaatacagccaagaaccaaatggtccctaccctccagtgggaaagacacactaaacacactatagaagtaaggcatacagctgggcgcagtggctcacacctgtaatcccagcattttgggaggccgaggcaggcggatcacctgaggtcaagagttcaagaccagcctgaccaatatggtgaaaccctgtctctactaaaaaaatagaaaaattagctggatgtggtggcggccgcctgtaatcccagctactcaggaggctgaggtcggagaatcgattgaacccgggaggtggaggttgcagtgagccgagatcacgccactgcactccagcctggccacagagggagatcatgtctcaagaaaaaaaaaaaaaaaaaggaaagcatatagaatgtcagatggtgagatgtgcctagagggagaataaagcaagaaaagagatgaggagtgtccactgagggatgggggttactgttttatttatttttatttttttagagatgaggtctccctctgttgtccaggctggatccagtgcaggggtgtgatcctagctcactgcagccttggactcctggtccaaagcaatcctcctgcttcagcctcctaagtggctgggagcacaggagcaagccatcacacttgactaatttttttttttttgagacagagtttcactcttgttgcccaggctgcagtgcaatggtgccatctcagctcactgaaacctctacttcccagattcgagcgattctcttgcctcagcctcccaagtagctgggattacaggtgcccactaccacgcctggctaagttttgtatttttagtagagatggggtttcaacatgttggccagactggtctcgaactcctgacctcaggtgatccgcccgcttcagcctcccaaagcgccgggattacaggtgtgagccaccgcgcctggccaagatcctcatctctaccaaaaataaaaaattagctgccgggcgcggtgcctcatgtctgtaatctcagcactttggaggccaaggaggccagtccagcgtgaccaacatggagaaaccctgtctctacttaaaatacaaaaattagcgaggctaggtggcacgtgcctgtaatcccagctattcaggaggctgaggcaggaacatcgcttgaacctgggaggcagaggttgcactgagctgagattgtgccactgcactccagcctgggaaacagaacaaggccctgtctcaaaaacaaaaaaaaaattaacttggtgtggtggtgcatgcctgtagtcttagccactctggaggctgaagtgggaggatccctctagctcaggagttgaggttgaagtgatgaagtgagccatgatcactccactgcactccagcctgggtgacagagccagaccctgtctcaaaaaacaaaaacaggctgggtgcgttggctcacgtctgtaatcctagcactttgggaggctgaggcgggcgtattgcctgagctcaggagtttgagacagcctgggcaacatggcaaaaattctgtctctactaaaaacacaaaaaattagctaggcgtgggggcgcatgcctgtaatcccaggtacttgggaggctgattcaggagaatcgcttgaacctgggaggccaagtttgcagtgagctgagatcgtgccactgcactccagcctgggcaacagagcaagactctgtctccctgtctccaaaaaaaaaaaaaaaaaaagcaaaaaacaaaacggcaacacaatcaccctaaattttcacaactactactatattactgctccattttccagatgaagaaactgaggcacagtgtggttaagcagcttgcccaaatgggaaagaaagtggaaaggtggtttttgagtccagggagcccacctccagggtccacagttcttaacccccagccagcagtgctcagctaaccttctggagcaagcagtggggttggtgtgggggaagccaggaaccagtgaaaagatgaccctaatagtttaggaccacggtggcggtagctgaggtgcttcagggcctggcaagggcgcgagcttattaagagaacagttacaaaggctaggcgcggtggctcatgcctgtaatctcagcactttgagaggctgagatgggtggatctccagaggtcaggagttcgagaccagtctggacaacaggatgaaaccccgtctctactaaaaatacaaaaattagctgggcgtggtggagggcgcctgtaatcccagctactcaggaggctgaagcaggataatcacttgaacccgggaggtagaggttgccgtttgccgagatcgtgccactgcactcccgcctgggcaacaagagcaatattccgactcttaaaaacaaacaaacaaacaaacaaacaaaaaacggggagggaggcgcggaggcggttacagtcctgcccccaccagcgatgtaacctccgcgcctcctctgggcagggcttcctggtcagcgtcctctactgcttcatcaacaaggaggtaggcagagacccggccgccgcccccgccctctggcggcagcgcggggtacggcgccgcctctgagcgccatcgtctcacaggtgcagtcggagatccgccgtggctggcaccactgccgcctgcgccgcagcctgggcgaggagcaacgccagctcccggagcgcgccttccgggccctgccctccggctccggcccgggcgaggtccccaccagccgcggcttgtcctcggggaccctcccagggcctgggaatgaggccagccgggagttggaaagttactgctagggggcgggatccccgtgtctgttcagttagcatggatttattgagtgccaactgcgtgccaggcccagtacggaggacgctggggaaatggtgaaggaaacagaaaaaaggtccctgcccttctggagatgacaactgagtggggaaaacagaccgtgaacacaaaacatcaagttccacacacgctatggaatggttatgaagggaagcgagaagggggcctagggtggtctgggaggcgtctccaaggaggtgacacttaagccatccccgaaagaggtgaaagagatcactttggggagagctggagaacaggattctaggcggaagcgatagcataggcaaaggcccttgggcaggaaggcgctcagccttggctggagtagaattaagtcagagccaacaggtggggagagacagagaagtgggcaggggcacccaagttgggatttcatttcaggtgcattggagattcttaggagtgtctcttgggggtaatattttattttttaaaaaatgaggatgtcactcttacccaggttggtcttgaactcctgggctcaagcaatcctcccaccacgggtctctcaaagtgctgggattacaggcgtgagccaccgcacccggcttttttttttttttttaaacggagtctcactctgtcacccaggctggagtgcagtggtgcaatttcagctcactgcaccctccacctcccgagttcaagcctcccgggtagctgggattacaggcaccgccaccatgcctggctaatttttgcattttcagtagagatagggtttctccatgttggccaggctggtctcgaactcctgacctcaagtgatccacccacctcagcctcccaaagtgctgggattacaggcataagccaccatgcccggcccaaatgggctaatgttttaaacagatccttcttgtctgccctgtaggaggacaaattatcaggggcaggggtggaagctggagcccagaaaggaggggactgcaggtgggaagtgatggtggctggaccaggatggaggccactgaggggtatgaagcagtcggatttgaagctgtttaaaaggtggaggtgagaggatttcatgaaggagcacatgaggacacagcagcagagaggactccttggctttggatggtggagagactaaagatagagagattgggttcgggtagggggagaaccacgtgtgctctttggaaaggttaggctggcagtgtttgtaggacatgacaggacactgagtgtaagggtctggagctctcaggagaggggcgagctggagatagtaatgtgagaggcactgggtcctgagagggtgatttggtgtggaccggagcacaggtgaggcaaggcaggcctcgcagctgaaactttatatccagagcagccagggccactgctggctgcggagtgaggacgcatatccccactgtccttagatgggtggcccctggaacctgggagaatgagggggcatgctgacagtctcattgtggctggaccacctgtacatacacccacaagaccctcacccctaaatcctccccctacacatatgcacacttaagttaccgtatgggtgttgtcgagcattttccctggggtctgtggctccctggaccgacatgccccaaagctgaactcagccttttcaagcttgcggccctgctgcccaattcccctacaccctgccttgtgggttctcgcggggtgggggccttagggcaaggctcttgtaaataaagtataagaaacagttgctttttttctttcttgggtagaagcatcttcttggcagtgtcacaaagggaaatgaccgaggcaggctgcctggtggagtaggggcccgtggtggctttactcaaatttatccatgtgttgctacaagaaaacgggacacctgctgccactgtccctcctaagagagtccccaagtggccatgttacatgtgatctgtgacatatacgatcagatgttacctgcatcctagggtcgcctggcatgcccatgagtgacgcttaggaccgtgcctggtgctggtgtgtggacaatgctgggccagtttgcccagggctatgcctgccacctctacttttatttcaccctctggaggcggacgcattggaaagcatgtggggcaggaggtgaggaaggaaattcagacaagctgagcagagcggccaggactggaatcttgggtgccaacccgcaaggtggggaaactgatttccatttcccagtaattacaggtcaataccacacctgagaaggcaggcaggaatggaacccagactgactccagggctgtgttgcttcctgtatcagaaccaaaccccgggtgacctcctgttgcatgccccttgtcccaactttatagattaggacactgcagctccatcttgctacccaagagttaagactttttctggaggacctggctccccgggtttggaaatagtaccattgtttcctaactgggtgaccccgagcaagttgcttaccctctcttggcttcaacgatctcatctataaaatgggatcacttaggtcgggcgtggtggctcacgcctgtaatcccagcactttgggaggccgaggcgggtggatcacaagatcaggagtttgagactagcctggccaacatggtgaaatcctgtctctactaaaaatacaaaaattagctgggcgtggtggcgggcgcctgtaatcccagctacttgggaggctgaggaagaactgtttgaacccgggaggtggaggttgcagtgagcagagatggtgccactgcactccagcctgtgggcaacagggtgagactccttctcaaaaaaaaaaaaaaaaaaaatagctctagtatccaccccacagatggttgtttccaattagatgtagtaaatgcacgcctttataaccccataacccattgccttctgtgtatcaggcctctctctgctgcagggtcccagctctgccacaatgctcacagtgtatctcaggctgtgcctttcttttttttgttttctttttcttttttttttttttgagacggagtctcactctgttgccaggctggagtgcagtggtgcgatctcggctcactgcaaccttcacctcccaggttcaagcgattctcccgcctcagccttccgagtagctgtgactacaggcgtgcaccaccacacccagctaatgtttgtatttttagtagagacacagtttcaccatgttagccaggatggtcttgatctcttgatctcgtgatccgcctgtcttggcctcccaaagtgttgggattacagggcgtgaggcaccacgcccggccccaggctgtgcctttcacagctcagagcagggcacacatctcactgagtgtgcactgacctcaggcctgcaaactcttgcaactttcaggtgtttgcctatatccagaggacagagacataggcagagacaaagatatggggggagggcccaacacagtggctcacacctgtaattccagcattttgggaggccgaggcaggaggatcacttgagcccaggagttcaagatcagcctgggtaacacagtgaaatcccatctctacaaaaagccggcaggaggatcaattgagcctgggcagtcaaggctacagtgagccatgatggtgctgctgcactccagcttggcagacagaatgacaccctgtctcaaaaaaaaaaaaaaacaacaaaaaacaaagatatggggagcacacgatgtgtgtgtcagagcaacacagggaatttccttaatccccccagtatataccacctccctttcccacctccatttatctccccaaatttgtcagagaattcctctcaagggtaatgcagttgaatctgaggggcagcagagctcaggggtgaagccacaggctctggaggtgagtttaaatcacagcaccaccacttcctggctggttgtccccgcaaagtgacattgcctctctgtgtctcagttccttcttctggaaaagggggataataaattaacaggcccgcgccagagctgttgggaggatgtttgaaaagcgctgagcctggcctggcacctaaacagctcagcaagtgttagccaggatcactagcagtaatatttagctactgactgctttcttttcttttctttcttcctttctttccttttttttgagaggtagtcttagaatctgttgcccaggctggagtgcagtggcgcgatctcagctcagtgcaacatccgtctcttggttcaagctattctcctgcttcagcctcccaggtagctgggaccgcaggcgtgcaccaccatgcctggctaattttgtatttttagtagagacagggtttcaccacgttggccaggctggtctcaaactcctgagctcaggtgatccacccgcctggcctcccaaagtgctgggattacaggtgtgagccactgcacccggcccttttttctgtttcttatctatttagtttagagatagtatcacactgtctataaaactcacaaccattctcccaggctagtcctaaacttctgggcttaagcaatgctctcacctcagccgctgtgctggtggcactgactgcgttcatcacctgtctaatcctcctgtctttcagggcagaccagaggctcctgggtacctggtgcccctgcactgcaacacagggctggacacacagggggcatttgggggatgtttgctgaaggaacaaacataaagaaaggctgaaagatacacatatataatttttgagatggagtctcactctgtcacccaggctacagtacagtggggccatctcagctcactgcaacctccatctccggggttcaagcaattctcctgccccagcctcctgagtagctgggattacaggtgcctgccaccatgccctgttaatttttgtatttttagtagagacggggtttcaccatgttggccaggctgatctcaaactcctgacctcaggtgatccacccgccttggcctcccaaagtgttgggattacaggtgtgagacaccacgcccggccagtttttgtatttttagtagagacagcgttttaccatgttggccaggctggtctcgaattcctgacctcaggtgatctgcccgcctccacctcccaaagtactgggattacaggtgtgagccaccatgcctggccccaaaagatactttggtcaagcgaggccaattcattataagaggtagagaagagagcaacagagtgacaaggagaagctcaggaagattaaagcaggagagctaaaatgttctccagagccacaactgggcgctcatttccatgcaaactgtttgctttgcagatggagaaagtgaggcctcgatggggcagagccagggcctctccacttgctcaggggtcctgctcccaccattcagtccgataccagctgcctcccccaagccctcctgaatccaccccactcccaaggctctggaaacagataccactagaaaaaaacacagagctttattattctcaacaccaatggcagcggtcttcataggacagaggagtgagttctgtcaacagacaggcggcccctacttgccggcgatgagcgggttccgcaggaccacgatgactgagtccccgcgcaggaacatcttggagatgtagcggtctttgttgactggcttggacttcttcttgcccttgccactcttgggtacctcagtccacatctccttcacgttctccagcaccatgttgcagtgcctggtggggaacagggaggggaggcactgggcgtgaggggcgtgcctctgacagtgccccctactgcctgctgctcgccccctccagcagcatggcttggggaagggtgcaggtgctaggccgggatgaccaagctgccaaagcaactctgccagtccttaggttgaggctgaggcaaaggactgcacctctctgtgccagtttgctcctttttaagagggaagataatcacgttaccttcctcacagggccattgaaaattatcattttcttttttgagacagaatctcactctgttgcccaggctgcaatgcagtggtgcgatttcagctcaccacaacctccgcctcctgggttcaggctattcttgtgcctcggccacctgagtagctgtgaatacaggcgtgcaccaccacgcctggcttttatatttttagtagagatggggtttcgccattttagctaagctggtcttgaactcctgacctcaggtgatctacccgccttgccttcccaaagtgctgggattacaggcatgagccaccacgcctggccatacaccccaggcttctgagacagctgtctttgagctcttcagactggagctggagtggcctctccaggcctgcggagaacacctcccaggacccagcactcacctatcgaaggccttcacgcggcccaggagtttcttattgttgcggcagttgatgagcacttgggtattgttcttgactgactgtgtgagcacagagagtggaccggtgttaaattcctcctcctctcgcttctgcagctcctctggggtcatctcactcttgggcttgttgaggaggctcctgcatggacaaacatggaaccaataagtgagagaggctggagttgagaggctggagctgtgaggatgggtgatcagggccttggcttcagtgtctccccaaccttgtcccaccacatctgtcctcctgttcagccttctgagtatcatcagctagatgcctaacagacattttttttttttttgagacggagtcttgatctgttgcccaggctggagcgcagtgatgtgatctcggctcactgcaacctctgcctcctgggttcaagcgattctcctgcctcagcctcctgaggagctgggactacaggcatgcaccacctccacgcccagctaatttttgtattttagtaaacagggggtttcaccatgttggccaggatggtcttgatttcttgaccttgtgatccacccgcctcgacctcccaaagtgctgagattataggcgtgagccaccgtgcccagccagacattttcaactctgcatgtctcaggtcgggatccagatcacccaaccacccaagcctaccctatctacagcgttccccatctgctttgatggtaactccatccttctagttctctgggcaaaaactcttttgtcaacttgattcctctttttccctcacatcctacatgaaatctgtaggaaatggccgtttcttaccatggcctaagcctctgtcatctctgtcctggaatctttctggtctctctgcctccacccacgttccctgacagtctgttctccacagagtggtctgagggggttgtgctaaaacctaaatcataacatgtcactcttcaaaaccctcccagggtatgggtacagtggctcatgcctgtaatcctagcactttaggaggtcaaggtggattgatcacttgatgtgaggagttcgagaccagcctggccaacatggtgaaaccccatttctactaaaaatacaaaacaaaacaaaacaaaacaacaataaaaaaaacaaccaacagaaaattagccaggcgtggtggtgcacgcctgtaatctcagctactcgggaggttaaagtagaagaattgcttgaactcagagagtcggaggttgcagtgaagtgagatcatgccactgcactccagcctgggtgacagagcgagactcttgtctcaaaaaataaataaatacaaattagaaaatacaaaaattaggccagatgcgatggctcacgcctgtaatcccagcactttgggaggccgacgcgaggtggatcgcctgagctcaggagttcgagaccacccagggcaagatggtgaaaccctgtctcttctaaaaatgcaaacaaattaaccaggtgtggtggcgcatccctctagtcccagctacttgggaggctgaggcagcagaaacgcttgagccccagcagcgaaggttgcagtgagccaagattgcgccactgcactccagcttgggctacagagtgagactccatctcaaaaaaaaaattaggccgggcgcggtggctcacgcctgtaatcccagcactttgggaggccgaggcgggcggatcacgaggtcaggagatcgagaccatcctggctaacacggtgaaaccccgtctctactgaaaatacaaaaaattagccgggcgaggtggcgggcgcctgtagtcccagctactcgggaggctgaggcaggagaatggcgtgaaccccagggggcggaggctgcagtgagccgagattgcgccactgcacgccagcctgggcgacagcgagactccgtctcaaaaaaaaaaaaaaaaaaaaaattagctgggcatggtggcgcatgcttgtaatcctagctactttgaaggctgaggcaggaagatcgcttgaacccaggagacagagctcgtgctactacactccaatctgggtgacagagcgagactccatctcaaacaaacaaaacaaaagaaaaccctcccatcctccccccatctcagtgtagaaagtaaaaccccgaccagacacggtggctcacacctgtaatcccagcactttggaaggtcgaggcgggtggatcatttgaggtcaggagtttgagaccagcttggccaacatggtgaaacctggtctctactaaaaatacgaaagttagctgggcatggtggtgggtgcctgtaatcctagctactcgggaggctgaggcaggagaatcgcttcaactcaggcggcggaggttgcagtgagctgagatcgcaccattgcactacagcctgagcaacagagcaaggctccgtctcaaaaaaaaaaaaaaaaagaaaaagagaaaaagatttttcttttcccttggggactagaggtttcattcactgatgtatcctatgtagcttaagcagtgtctgatacataagcattcaatgtaatatctgctgcactaataaatgcgcaaaatcatgtcaatgactcgttcgttatccgtgtaagttgtgaatcaagtcgaaaacgcacccgtctccagctcaaatgatcaagataagtcccttatttcaaataattatttctaaaagtcctaacttccctcccccattattcgttttatttcttttgtttcgttttgagatggagtcttactctgtcgctcaggctggaagtgcagtggcgcaatctcggctcactgcaacctccgcctcccgggttcaagcgatcctccggcctcagcctcccgaatagctgcaattacaggcgcccgccactacggccggctaatttttgtatttttgttagagacggggtttcaccacaatggccaggctggtctcaaactcctgacctcaggtgatccgcccgcctcggcctcccaaagtgctgggatttacaaacctgagccaccgcgctcggcctcccccagtattcgtaaaatcgctgccccttaacattcatttcaataggactaattatctaggaccactcccgttatcgtttaaaacatgtttttcataattaaatttttttttttttttgtagagacgggggtctcgctatgttgcctaggctagtctcgaactcctgtgttccagcgatgctccgccttggcctactaaagtgctgggatcacaggaatgagcccccgcgcccagcccagggcgttatctgataaagctgtcccctctcccgaagtcacgatgcgtcaaaggccccacgcccgttctcaaactcatcaggagaaaagcaggacgctgcatccctaaaacatctgcccctgccccccccgctctgctcaacccttcccacactcaatcggtcaaatatccaccctcaacctcattcccgccgcctaagcctagcccggcctcacatgatggtcactacgctctccgttcactcccgtttcctccgcgttgctgctgcctgaggagagagaggcgggacttcctcttcctgcgacccacttccgttggcgcctgcgcaaagccaaccagtaagtggaggcgtggcctgttgccacagcattccccaccaacggtgcacaatgatggaataaaagcttcgggtaggggttcgcggccagtcagaaccacacgggggcagatgtttatgacaatgaagacaaaaggaaaggcagtctgattcaaaccgtttcttgaagaatggtacaggttgaaggagggaaatgacaagctatttccaaatgcccgccggccgtgacttcgggggcgcggcctccgtgaagccaatccgctcctcgcttcggagacaggcaccgcccctcttccctctgggacgcgttactgacgtatctactgatctttccgaccctgcgccaccaatcccctgcctacatccggaaggggcatggacctgcgcccgggagatcgaatattttccatgatcaaacgctgttcattggctttccctcctccgctaaggcggagcctacttctcttgcgctcccatttgggtcgtgccattctcaggggaaccaaccccaatacctaagggaggctgggaggcgtgtcctcaggaccgtagttcttattggtttcgctgctcgctgtggggtgggctggtgcagccgcagctgttgcttattggcccaccgattccatggggaggaacttggctgggcctaaactcaatccgtggtctggtacaggtttcagggcaaagcggccatgcgttccgggggccgcgggcgaccccgcctgcggctgggggaacgtggcctcatggagccactcttgccgccgaagcgccgcctgctaccgcgggttcggctcttgcctctgttgctggcgctggccgtgggctcggcgttctacaccatttggagcggctggcaccgcaggactgaggagctgccgctgggccgggagctgcgggtgaggctgggcggggacccgggcaccgcggggaccctcattccctccccgctgttacccagggttgacgtggctttagcgtacggccctaaccgcagatgccaccgtcttcgtcatctgagcgcatgacccttaccaaaggaataaggcttcgggctggttctgcaacagtagcttccttttaagaggaaaggtctgaaatagtaagacgggggggttcagggttctacgcctttagtcaactatttggaagagtcccttcctccatctcccctctctctcactgggcctcgatttccccatcaagtttgaggtaggctggaccggatggtcttggaaggacttttcctgagccttggatttatcctagaagtctccgatgctggaggcggcagattaggaagagaacccggggctcctcgcgggtgacggcgcccggggtagggttgaaatgggggggttgctctcattcttcccttccctatcccacctccttcccaaggtcccattgatcggaagcctccccgaagcccggctgcggagggtggtgggacaactggatccacagcgtctctggagcacttatctgcgccccctgctggttgtgcgaaccccgggcagcccgggaaatctccaagtcagaaaggtaaagggacccacctccagtccctgaccccctagccctccagggaatgggaaataagaatcctgttcaagatcccaaagaagctaagaggaggaactggggctctgactggagttaatcggactctagactccatgctggtaacaaaccaccaggctgtactgccccccttaatgcccccaccaaaagcttactgtgtgctaggcataggcaacagacagccctataaggtgggtaccaatatgatcttcattatgcagatggggaaactgaggctcagagaggttatacacattgcacaaatcctacagataataagtagtagaccttagccgggtgcagtggctcatgcctgtaatcccagcactttgggaagccaaggtggaagaatcacctgagaagtttgagactagcctagtcaacctagtgagacccaatgtttagaaaatcatagacctagagttgaacccaaacaggttggctccgagctggtgctgtaatgtatctgttgtcttccagaaagcatgaagagtcatttaaaggccaggcgcagtggttcacacctctaatcccagcactttgggaggccgagacaggcagatccctcgagatcaggagtttgagaccagcctggccaacatggtgaaacctcatctctactaaaaatacaaaattagccaggcgtggtggtgggtacccgtagtcccagctacttgggaggctgaggcacgagaatcacttgaacccaggaggcggagactgcagtgagctgagattgcgccactgcaccccagcatgggtgacagagcgagactccatctcaaaaaaaaaaagtcacttaaatactgcctgagtcccaatgctacctcatccacttagattgtgaccttggactggtttcttttttattttattttattttattttattttgagatggagtctcacactgtcgcctgggttggagtgcagtggcgcgatctcggctcactgcaacctccacctcccaggttcaagcaaatctcatgcttcagcctcctgagtagctgggattacaggtgtgcaccaccatgcctggctaattttttgtatttttagtgagacggggtttcaccatattggccaggctggtctcaaactcctgaccttatgatccgcccacctcagcctcccaaagtgctgggattacaggcgtgagccaccgcgcccggcctggactagtttcttaacctctctgagcccatttcctcatctgtaaaatggggtcatgtattggcagtccctcccctaaatggttcctagaagagggcttagcacacagtgagagctatttaagggtaagctgtgatgagtcttgctggcttcaagaggtggggtctccccaacatctggcacccagtaggtactcaccagcactgtcaagggaatgattttaatcagagtagggggctgggcacagtggctcacatctgtaatcccaacactttgggatgctgaagcaggcagatcacttgaggtcaggagttcgaataccaggctggccaacattgtgaaaccccatctctactaaaaatacaaaaaatagccaggcgttgtagggggcgcctgtaaccccagctactcaggaggctgagtcaggagaatcacttgaagccaggaggcagaggttgcagtgagccaagatcaagccactgcactccagcctgggtgacagagcaagactccatctcaaaaaaaaaaagaaagaaagaaagaaatccattcaatcagagtggggctttagtgtcaacccatctgctctgcatggctcaggtcacgtggcccttctccccacctcctccccagtccccgtccaccctcccacctctctcttgccgctagttcctggaggccacgctgcggtccctgacagcaggttggcacgtggagctggatcccttcacagcctcaacacccctggggccagtggactttggcaatgtggtggccacactggacccaagggctgcccgtcacctcacccttgcctgccattatgactcgaagctcttcccacccggatcgaccccctttgtaggggccacggattcggctgtgccctgtgccctgctgctggagctggcccaagcacttgacctggagctgagcagggccaaaaaacaggtgaggagcaggagtcggggagggtagtgggctacctccaccttttcccaagcccccaccctcccttgcctggacatttgtcatccctctcgtcttcccactctactccacgcacagagccacagggatcttttttttttttttgagacggagtttcgctcttgttccccaggatggagtgcacatggcgagatcttggctccccgcaacctctgcctactgggttcaagcaattctcctcccaacctcaggtgatctgcccacctcggcctctcaaagtgctgggattacaggcgtgagccaccgcgcctggtcatcacagggatctttttaccttctagatgtcagattctctttcctctcccccaaaccctcccagggctcccgcctcattccagccataatccagagtccttatattggcccacgagctgtgccctgttacctctccagcctcatctcccacccctcacctcttgctcactctgctgtagccacccccacctcctctgggttcctcaaacccgcagagcttgctcccacctcagggcatctgcacttgctgtttgctttggatagaatgtgcttttctggccaggctccgtggctcacacttggaatcccagcactttgggaggttgaggtgggtggatcacaaggtcaggagttcaagaccagcctggccaacatgatgaaaccccatctctaccaaaaacacaaaaattagccaggcttggtggtgcacacctgtaaccccagctactcgggaggctgaagcagagaattgcttgaacccgggaggcggaggttgcagtgagccaaagttgcaccactgcactccagcctgggcaacagagcgagactccatctcaaaaaaaaaaaaaaattatctgggagtagtggcatgctacttgggaggctgagaggggaggatggcttgagtctaggagtttgagactgcagtgagccatgatcgtgccactgtattctagcctgggtgacagagaccttgtctcttaaaaaaaaaaaaaagaatatgcttttcatagatatcttcctggctggctcccactcttcactcaggtgtccactccaatgtcaccccttcaaagaggccttcccggccgggcgtggtaactcgcacctgtaatcccagcactttgggaggccgaggcaggcagatcatttgaggtcagaagttcgagcccagcttgtccaacagggaaacctcatctctactaaaaatacaaaaattagctgggtatggtggtacatacctgtaatcctactacttgggaggttgagacaggaggatcacttgaaactgagaggcggaggttgcagtgagccgagatcgcaccactgcactccagcctggatgacagagcgagattctgtctcaaaacaaacagaaaagaaaaacacaggccaggtgcggtggctcacacctgtaatcccagcactttgggaggccaaggcaggtggatcgtgaggtcaggagattgagaccatcctggctaacacagtgaaaccccgtctctactaaaaatacaaaaagttagctgggcgtggtggcgggcgcctgtagtcccagctacttgggaggctgaggcaggagaatggcgtgaactcgggaggcagagtttgcagtgagccgagatcgcgccactgtacgccagcctgggcgatacagcgagactccgtctcaaaaaaaaaaaaaagaaagaaaaaaaagaaaagaaaagaaaaacacagatttaatcatgctcctgccctgcttaacccctctctgtgcctccccagtgtccctataacaaagcccacactccttggcccttgctaaaccttccgtacccctctcaaacctctgggaccccttccctggccatagccttgccctgtgttgctcccttggctgggaatactcttcctcctgctccattttgccaggccagttcctacccattctcatggcaaacatcccttcccaaaagacccaacgccctctccaggccaggtcatcccccagcctccttcctatgccctctcaggactctatagttcttagaagcatttgtctcaactgcatttcactgtttgtataattattcatttgtggatctatctggttcaccaaactgagcttgaggaataataatcagagataacccttatttagttatatgccaggcactgttctaagacctggattcaaaccttaccctttgaaaagaactgttattgccgggcgcggtggctcacatctgtaatcccagcactttgggaggctgaggtaggtggatcatttgaggtcaggagttcgagaccagcctggccaacatggtgaaagcttgtctctactaaaaatacaaaaattagccaggcatgatagcgggaacctgtggtcacagctgtatgggaggctgaggcaggagaatctcttgaacctgggaggtagggggtggaggttgcagtgagtcaagattgcatcattccactccagcctgggtgacagagcaagatttattctaaaaaaaacaaaaaacaaaaaaaaaacaaaaaacctcttattaaccccatttatagatgaagaaactgatccttccagaagttagtaacttccccatgcctgctttgttatgaagcagccaagtacggatttgatcccagacaactgactcggaatctgtgctcttggctaccacgttctatgagtgaggacaccttatgtgttctcttaagcatgcaagcgggcaagaagtgtgggtatgttgaggctgagggctagtcctgagctggctctggccacccccctgctgctcccacaggcagccccggtgaccctgcaactgctcttcttggatggtgaagaggcgctgaaggagtggggacccaaggactccctttacggttcccggcacctggcccagctcatggagtctatacctcacagccccggccccaccaggatccaggctattgtaagaccagggtcccctggcttctggcgagggagggagcaggttaagcagggctggcgtcatcctgcacgggcccctccagtcctagcctttctccttaggagctctttatgcttcttgatctcctgggagcccccaatcccaccttctacagccacttccctcgcacggtccgctggttccatcggctgaggagcattggtaagggtgaatgcggaggtgggccccagcccacctggggtatggggtacagggcggtgggctggggtaggacaggcacctacactctaaaggctcatccaccagtctgggccacatagggagaccccatcttttttttttttttttttttgagatggagtctcgctctgtcactgagactggagtgcagtggcatgatcttggctcactgcaacctccacctcccaggttcaagccattctcctgcctcagcctcccgagtagctgggactacaggcgcatgccaccatgcccagctaatttttgtattttagtagagacagagtttcactatgttggccaagctggtcttgaactcctgacctcgtgatccgtccacctcagcctcccaaagtgctgggattacaggcgtgagccaccgtgcctggtgaccccatctcttaaaaaaaaattagctgggtgcagtggcatgcacctgtcatcccagctactggggagtatccttagagcctgggaggtcaaggctatagtgagccaagattgcgccactgcactccagcctgggcaacagaatgagatcctgtctcaaaaaaataaaaaataaaaataaaataaaggctgggcttggtggctcacacctgtaatcccagcactttgagaggcaggtggatcacttgagctcaggagtttcagaccagcttgggcaatatggcgaaaccctgtctctacaaaataaaaacaaacattaggccaggcgcgatggctcacacctgtaatcccagcactttgggaggccaaagcgggtggatcacctgaggttaggagtttgagaccagcctggccaacagggcgaaaccccatctctactaaaaatacaaaaagttagctgggcgtggtgacatgtgcctgtaatcctagctattcgggaggctgaagcaggagaatggcttgaacctgggaggcggaggttgcagtgagccgagatcacgccactgcactccagcctgggcaacagagcgagactccatctcaaaaaaaaaaaaaaaaaaaattagccaggcatggtggcacctgcctgcagtcccagtgacttgggaggctgaagtggtaggatcacttgagtctgggaggtcgaggctgcagtaagctgtgatcacaccactgcactccagcctggggacagagtgagactctgtctcaaaaaaaagtaataataaaaattaaaattaaaaaaattaaaaattgtttttaaaaataaaggcttggctgggcgcaatggttcacgcctgtaatcccaatactttgggagactaaggtaggtggatcacaaggtcaggagtttgagaccagcctggcgaatatggtaaaaccctatctctactaaaaatacaaaaattagctgggtgtggtagcgtgtgcctgtagtcctagctactccggaggctcaggcagaagaatcgcttgtacctgggagcacaggttgcagtgagctgaaattgtgccactgcactccagcctgggtgacagagcgagactctgtcactaaataaataaataaataaacaaataaataaataagaaaataaaataaaggctcacccagcctttcctctacctccctagcctttctaaggaactagagattagtaatagtgattaccagacaggggctctaaggtgagacagccgtggtttccaatcttaccagctggatgaacttggacaagtggcttcatttctttgagcctcagtttcctatctgtaaaacggccagtgggggccgggcctggtggctcatgcctgtaatcccagcactttgggaggccgaggtgggcgaatcacaaggtcagcagttcgagaccagcttggccaatatggtgaaaccccatctctactaataatacacaaattagctgggtgtggtggtgggcgcctgtactcccagctactcaggaggctgaggcaggagaattgcttgaacccgggaggcggaggttgcagtgagccgagattgtgctactgcactccagcctggcgacagagcaagactctgtctcaaaaaaaaaaaaaaaaaaaaggccggagggcccagacatagtggctcatgcctgtagtcccagaaatttgagtgaccaaggcaggaagatcacatgaacccagaagtttgaggccagcccgggcaacacaggaagatcccatttctacacacacgcgcacacacacacacacacacaattacccaggcatgggggcatgcgcctgaagtcctagctatttgggaggctgagactgaaggatcacttaggccagcgagattaaggctgcactgagctgggattgtcccactgcactccagtgtgggtgagagagcaagatctttttttttttttttggagacagaatcttactctgtcacccaggctggagtgcagtggtgcaatctcagctcactgcaacctccacctcccaggttcaagcaattctcctgcctcagcctcccaagtagctgggattacaggcgcccaccaccacacccagctaatttttgtatttttagtagagacagggtttcaccatgttggccaagctggtttcgaactcctgacctcaggtgatccacctgccttggtctccctaagtgctgggattacaggcatgagccaccacaccaggccacaagatcttgtctcaaaaaaaagaatgtctatgtcttagactctgagggattgaatgagaccaggaacatagtgagcccacaggaaggagtaactggcattcactcttgttgggctgaccagggctttgtctctgggtgctctgccttcctctgatttgtggactggggaccttcgactactaaggactaacccttcctctctaatcgcccccacttccagagaagcgtctgcaccgtttgaacctgctgcagtctcatccccaggaagtgatgtacttccaacccggggagccctttggctctgtggaagacgaccacatccccttcctccgcagaggtaccagctgcagggagggatggagggtgggtgtccaaggaagccacaaattggaactggccaagtccccttcccagggctggggaatggtgctaagtggccttaacctctttgtgctttgatttattcatctgtaaaatggggataatactccctatcttagagtattgttgaggggattgaacatgctaacaccggtaaagaccttacttggaccagcacccagcacatagcaagcattccagaaatgtttgcagctgggcacggtggttcacagctgtaatcccagcactttgggaggctgagcggggtggcggggggggatccttgagcccaggagtttgaaaccagcctgggcaacatggcataaatcttgtctttactaaaaatacaaaaaaattagccgggcatggtggttcacacctatagtcccagctactcgagaggctgaagtgggaggagcacttgggcctgggaagtcaaggctgcagtaagccttgattgagccactgcactctagcctggacaacagagggtgatgatatctcaaaaaaaaaaaaagtgccaggctgggcatggtggctcacacctgtaatcctagcacgttgggagcctgaggcgggcagatcacctgaggtcagtagtttgagaccagcctggccaacatgatgaaaccccatctctactaaaaatacaaaaattagacaggtgtcgtggtgcctgcctataatcccagctacccgggaggctaagacggtagaatcgctggaacctgggaggcagaggctgcagtgagccgagatcacgccactgcactccagcctgggcgacagagtgagactctgtctcaaaaaaaaaaaaaaagtgccagaacatagtatctttcaccagtgtgtggtggcaaggcaaggttacctagaggttgggcttgggctcctgggttgtggtgggctgcagtggacctgacaaagtctcctctgtcacttcaggggtacccgtgctccatctcatctccacgcccttccctgctgtctggcacacccctgcggacaccgaggtcaatctccacccacccacggtacacaacttgtgccgcattctcgctgtgttcctggctgaatacctggggctctagcgtgcttggccaatgactgtggagaggactgtgagagagaaggtcccagcgggggccagtgaagctcaggcaggatctgcctagggtgtgctggtttgtccttttcatacctttgtctcctaattgtgctacaattggaagaccttctttcttttgattgtctcaagctgccacccttcaaggacagggaagagaccactgtgggatgacagccagaggaataagaacttgctccctccccagaggtaaacacttggtccaaaggtttgcagggaccaaatactgttctttttttttttgagacggagtctcactgtgttgcccaggctggagtgcagtggtgcgatctcggctcactgcaaactccgcctcctgggttcacgccattctcctgcctcagcctcccaagtagctgggactacaggtgcccgccaccacgctggctaattttttgtatttttagtagagacggggtttcaccgtgttagccaggatggtctcgatctcctgaccttgtaatccgccagcctcggcctcccaaagtgctgggattacaggtgtgagccaccgcacctggcaaaatgctgttctttaagtcagcgaactgaaaaagtaaaagactgctgggtgtggtggctcacacctgtaatcccaacactttgagaggctgagggggaaggatcacccgaggtcaggagtttgagaccagcctggtcaacatggcgaaaccctgtctctactaaaaatacaataattagctgggcatggtggtgggcgcctgtaatctcagctgcttgggaggctgaggcaggagaatcacttgtacgcaggaggcggaggttgcagtgagccaagatcacaccactgcactccagcctgggcaacagagcgagactccatctcaataaataaataaataaataaatattttttaaaaagagtaaaagactaaaagactattactggtctggcccagtgatgccacccagctagatgaattctctgtggtttgtgttgtgtcagttcattctccagaacagcagccttgctactgcaccagtcctaacctaactcccacacggggcacacagaggatgtcctcataaccaggcacagaggagacagaagctcatattttggaagtccagattcttccagacccagtgggtaataagccattgtttctggctgggcatggtggttcacacctgtaatcccagctctttgggagtcagaggcagagggatagcttgagctcaggagtttgagaccagcctgggcaacagagcatgaccccattctccagaaaaaagaaagaaaaaaaaaagcgtaaccaatgtttctgcaaaacaccacctgcataagccaggtgtggtggtgcacaccctgtagtctcagctattcaggaggctgaggtgagagaatcccatgaacccaagagttcaagaccagcctgggcaacacagtgacaccctgtctcaaaacaaacaccaccaccaccaacaacaacaaaaaaggccattctgtagaactcgtgtaaatagacattgcatgacaagggggatctgaaatccaagaagagggtgagacaacataaaatgagtttcctcactgcatcatgtgaatttttaagacagaacccagaggctcccaaagtatttcactatggaacactttttattgggaagcacttcatagaactaggatacttcggccgggcatggtgggtcacacctgaaatcccagcactttgggaggccgaggccagcagttcagctgagctcaggagttcgagagcagcctggacaacatgatgaaaccccatctctactaaaaatacaaaaattagccaggtgtggtggcatgagcctgtaatcccagctacttgggaggctgaaacaggagaattgttggaacctggtggcagaggctacagtgagccaaaatcacgccactgcactccagcctgggcaatagagcgaggctgtctcaacaaacaaacaaaatacaacaacaacaaaaagaactaggatacctcagaaggtactttggaaaacatggggttttgaaagtctgagagcatctatgagaggaatgggtaagacagatctagatttaccgcagagtagttagggcacactgtctttccccttcagctgttggtacagcactgtgagatggcagtgtaactgcaaactccaatgagcaagtatttcccaaccctacctaattttcagactcagctggggtgctcattaaaaaatgcagactgggtgcagtggctcatggctgcaatctcagcactttgagaggttgaagtgggaggatcacttgagcccaggaggtttttctttttgaggcggagtctcgctctgtcacccaggctggagcgcagtgctgcaatgctggctcactgcaacctccgcctcccgggtacgagcgattctcccgcctcagtctcccaaatagctaggactacaggtgcgtgccaccacgcctggctaatgtttgtatttttagtagagacagggtttcaccgtgttagccaagatggtctcgatctcctgacctcgtgatccgcctgtctcggcctcccaaaatgctgggattacaggcgtgagccaccgtgcctggcccacgctgtccttaaggagacactttggtgcatacacagctgctcagcaaaccgactcaaaagaaaaacctgagacagatggcacctggaagcagtcctacgctgtgtaggtgagcatctgccctccaaatcagctccagggctgaaactcggggtatcaaatgagaggataaacataggtcctcaatttaggttcttccacattcgctgacatttattgagcatctactatgtgccaggcatcatgagaacttttttttttttttaagatggagtttcgctcttgtcacccaggctggagttgcagtggcacaatctcggctcactgcaacctccacctcctgggttcaagcgattcttcttcatcagcctctggagtagctgattacaggcatgtgctaccatgcccagctaatttttgtattttcttggtttgggggagagagtcttactctgtcgcccaggctggagtacaatggcgagatctcagctcactacaaactccacctcctgggttcaagcgattctcctgcctcaatctcccaagtagctgggaatacaggcacctgccaccatgccctgctaatttttgtactttttagtagagatgggaccatgttgatcaggttggtcttgaactcctaacctcaggtgatccacctgcctcggcctcccacagtgctgagattacaggcatcgagccaccatgcctggccaatttttgcatatttagtagagatgagttttgccatgttggccaggctggtcttgaactcctgacctcaggtgtccacccgccttggcctcccaaagtgctgagattacaggcgtgagccaccgtgcccagcccatgagaactttttttttttacatatacaaaactatgtagtctccctgactacaaatcctgaaataggtacaatttcagttctcattttgcaggtgaggtggctgagactgagaattgcaaacgagttgtgtatggtgtgcaaattttcactcacagctgtgctcgcaacccccatgtcctatctcccttccaaaaagtacctgtggctgggtgcggtcactcacccctgtaatcccagtcctttggaaggttgaggcaggaggactgtttgagcccagaagttcccgaccagcctgggcaacaaagaccctgtctctacaaaaaaaattaaaattagctagtatggtgcctgtggtcccagctacttgggaggctgaggcaggaggatctcccgagcccaggagtttgaggttacagtcagctatgattgtgtcactgcactccggcctgggtgacagaatgagaccctgtctcaaaaaaataaaaataaaaataccccaaatacacccccaccactaccaaaaaaaaaaatacacttgtgccagatgaaatttgttaagaaaaagtatccatagaattttaactttaatctgctttatgcagatttttggcttgaatctggggtaagaactgttagccctgttgtacagatgaggctgctggtgcctggcaagttcccgcagccagcaaacccttttatcttttttttttttttttctagacagagtctcgctctgtcgctcaggctggagtgcagtggcacgacctcagttcagtgcaacctctggctcccgggctcaagcaattcttctgcctcagcctcccgagtagctgggactacagccacacgccaccacgcccggctgatttttgtatttttagtagagacagggtttcactgtattggccaggctggtctcaaattcctgatgtcacaatccaccgcctcggcctcccgaagtgctgagattacaggcatgagccactgtgcccagccttgcatttttcatttgtaaaagttatgtcagtgggttttttttccctttcctacctactaggccattttgatttttttttttttttttttttttagttttggcttccttgctgataattccaagcttttaaaatttttaaacagtttaaaataaattttgtattataatctgtgattgacagtttcatcatgtgaagcctatgtgggtgtttttgttgtttctgctggttcttattcatattatttccatttgtttggttatttgtgtactactcattacctgaaaaattatttgtggtgggctgggtgcggtggctcacacctgtaatcccaacactttgggagaccaaggcgggcagactgcttgaggtcaagagttcaagaccagcctggccaacatggtgaaaccccatctctaccaaaaaaaaaaaaaaaaaaaaaaaaaaattgctgggcgtggtggtgggtccctgtaatcccagctacttgggaagcctaggcagtagaatcgcttgaaccggggaggcggaggttgcagtgagctgagattgtgccactgcaccgtagcctaggcaacagtgagactccatatccaaaaaaaaaaaaaaaaaaaaaaaaaaagccaggcgtggtggctcacacctgtaatcccagcactttgggaggccaaggtgggtcaggagttcaagaccagactggccaacatggtgaaaccttgtctctactaaaaatacaaaaaattagccaggtgtggtggtgcgcacctgtagttccagctacttggcaggtgaggcaggagaatcacttgaacccaggaagcagaggttgcagtgtgccgagatcgcgccactgcgctccagcctgggcaacaagagcgaaactgcatctcaaaacaaacaaacaaaaatatttgtggggcttctagatgacagttccttccacaggtggacttgtgtttgtttctgccagacatgtcagctagaagtaccctgtatcacacaggacgtgaacctggctgcgaacctgtgccgagggccagtctgtgaccacagattatcagaatctttctttttttttcatttgatttctgcctcttgaatacctcttcagtcttccgggtcatccttacctgagcttgtagctctctggaatcccagttcctgcagttgctcactgtgggctggctttggacttgacttttgcctgctccttccagtaaggctgccaagtaggaaaccccagtgtgtccacatcagcaaacaccctgagagcaaatgtggcttcagagccccacatatcattcttttttttttttttttttttttgaggcggattcttgctctgtctcccaggctggagtgcagtggcgcaatctcggctcactgtaagctccgctccccgggttcacgccattcccctgcctcagcctcccgagtagctgggactacaggtacccaccactacacccggctgattttttgtatttttagtagagatggggtttcactgtgttagccaggatgatctcgaaccgcccgccttggcctcccaaagtgcttgggattacaggagtgagccaccgcgcccggctcccacatatcattctcttaactatttggcgtggtgggtctttactgtattttattggctatttgatcctttgaagggcatttttttttcagttgttctcaacaggaaggtccgaataatctaactcaccctccccacaagattcaaacccaggtcttattgattctaaaatctaagcattgaatcactaccataatgtatcctagtcctctggaaattctgatttccggagaagaatgtcagagacttagctgcctctcaatatccatttttcccttcctttaaactgaaaatttaagatatccagctgggcgtggtggctcatccctgtaatcccagcactttgggaaactgagatgggtggattactggaggccacgagttcgacagcagcctagacaacgtggtgaaaccccgtctctactaaaatacaaaaattagccagctgtggtggcgagtacctgtaatcccagctactcaggaggctgaggcaggagaatcatttgagcccgggaggcagaggttgcagtgagccgagatcacaccactgcaccccagcctgggtgacagattgagactgtctcaaataaataaataaaaaattaagtggctatttaaaaactttaattacagggatttttagtaaagagtgttttgttgggcatattgcacccagctaaaagactgcatttcctagactcatgcagcccttctgtggctaagtctgacgggtgagatgtatatagaagcatagtgtagtgcttctgggaggaagggggcctcccttccagcaaaatggtgatagtaaaagcaatataatcttggctgggcatggtggctcactcctgcaatcccagcactttgggaggccgaggcgggcggatcacgaggtcaggagatcgagaccatcccggctaaaacggtgaaaccccgtctctactaaaaatacaaaaaattagccgggcgtagtggcgggcgcctgtagtcccagctacttgggaggctgaggcaggagaatggcgtgaacccgggaggcagagcttgcagtgagccgagatcccgccactgcactccagcctgggcgacagagtgagactccgactcaaaaaaaaaaaaaaaaaaaatttaaaaattagctgggtatgtggcgtacacctgtagaaaacccagctgcttggcaggttgaggtgggaggtttccttgagcccaggaggttgctgcagtgagctgtgatcataccactgcactccagcctgggtgacagagagagaccctgtctctaagggaaaaaaaaaaaaaaaaaaatcttgttcaagctactactattttgagatttttcaaatccaaattgacacagatgagaagagtaaaaaataatctcaggctaagggacttggctagggatcccttctctttccactttttccatcccccatacacaggcctacaactcccctctcttcccaaaccctcccttcacaacacacaaaccagtctgcacacagccttataaatattgattttatagaaaggaccaattcaaaattggtcagatgccacacgctagaagcttccagaaccacgatggaaagaaaaaaaagaaaacaaaaaacagagagaacaaacaaaaataccccagaccaaaatgcctgaaaaatcaaggtcctggttgaccaaaggattcttaaagaaacatgtggctggggtgaggagaccccaatgcctgaacgagaccccagagtggaaggaaaaacaacccagaaatgcaaatccgaagtccctgcccacggggcccccccacgctgtcaaaagcgaggcaaagggcttcacagctttatgggggtggggttgatggcagtagcttaaataataacgggaggaggagggtttttatacttcagctttttttttgtctgcccccctcttcctctacgcggaagaggagagactggtagcttgaggttaaggagaaaacagtatttcccccccacttctttaataggcaaaccatctagaaatggactgtcataaaaaaatgccagatcccacctgtgacctgacagcccccaattcctagagaggtgagagctgtcgtgtggcaggttaggagaggtgccaaccttgggcgatgcggcttcttgggaaataacagctccagcgagaaagaattggggtgagggagaggatgggggccagaatggggggacccttaagtggtaccaaaattagctgccgtctgctccctgctggtgggtccttggggtggaaagcatggcagggagggggttggggctgaatggagaagaaagtgagatgctgataaaaaaaaaaaaaacacccttctcagagggtccacggccctggttctgaagagtagaaaatcaacaggatcaagcagagggctttcctgggtcacccctgctgaaccccagctcagttccggtgagggatcaatgctgcctggagtaggggaatgggcaggcggcccagtccggaccctcggctcccggggggagaggggaggggtgggcgtggtgggctctcccctcccctcccccggcttcacctcccctcctcccggccggcccggcccccgcctggcccattgcagggcagcacccagttgttatcgtggaggcccaggcggcagccgggagtctcgcggtcggctcgacggcagcacatccagtaggaacgtccgtaaggcaggtcatggtggtagggcttggggtgccagcggcagagcgacacgtcgcccttctcgtatctcttgcggcactgtttgcacggatcatcgcggtagagcgggtctcggctccagcgcgagtctgtggcccgcacgccaaacgcctcgatgatgcccttgaagtggtggcaggtgcacttgagggcggccagcgcgcgcgtgggcaggaagctgaagatcttgaccagcacgtgctcgggcagcagcagcatgtactgtcgcggctccagcagccgctgaatcttgaagcggatctctaggaagtcgtgcgacacgtgccggtacaagcggcacagggaggtgtccgccgtgccctcggcatcgtctgggccgggcgcagtggccggggagtcggccgggggtggctccgggggcccgtccggcccgcggttctggagaaagaagagctggcccggaggcggcggttcctccgggctgaccgtcaggcacacagtctcctccttcacgttcttggtgccgtccttgccaaagaagatgcactcatctaccacgcccgtcaccaccacgtccacgtggaagcctgacgctccgcagtcccgggcagggggcggagggggcgccgggggagtgtcctcaggcctggcgggtgccgggctgtcaccctcactggcctcatccgccctggccagcaggaactccacgttgctggggagggcatcccgcgaggggctgatgagctggtataagtcacatgtgatcttgtccttggctcgggccccaggacctgggctgccagggtaggcacaaccaggcctgcccccgcccccactgggcaggccgctgtctggtgcacggggctcccggccgttggagatgcggaaggcgatgcgcacctccccagggcctggcccgggccgctcttccttgcggaggcccttggtgggagggctgtccctctgcgcttcaaagtgggccacggcctcggctacacggctgcagtccccaccaccggaccgccgttcagatcccacccccttggccggtccaccttgctcggcggacacaaagactacaggcgctggggtggtcggtcgtgggtagctctgcagggccagggctgcccgctgttccaccagggccaccatctcggccacagagagcaggtccacgtcctcaccggctgaggcggggccctcctcagcagcaggggggccctcccggccccctgggtcaggaggagccttggtggggtcaagacagcgcctccgccgcttggccttggagctatcgctgccccagtgccccttgaccttcatggagctggcccggctgcccccaccacactggtgggccacaaagaaggccaccttctcctttgtattcccgggcttgatgacataccacgtgtccaggaggactcgaccctcatcaccagcagctgctgctgagaggagcggagccggctgggaggcagggacctcagtggccaaggcgggtggtgtgttctctgagtgggcaggcccatggtctggctcggccccgccaccaggctcagggcaggctgatggcttgagggccgcagaaggcgggcgtggctggttctgtgagtaggtgccaaagggccgggggcaccatagctggaagggcaggaggctcccacggtccatgctgggggatgatggcagacaggctgggcttcagcgcatctcaggacctaggtggtggtgggaggctccacatgccacctggagacacgaagaggaggttggggagctagggggacagcctttcttcccaggaccaccccaacctccacctctccttagaccaaaccagaccatcaagaactctattcctggctgggcgcggtggctcacgcctgtaatcccagcactttgggaggctgaggtgggcagatcacctgaggtcaggagtttgagaccagcctggccaacatggtgataccccatctctactaaaaatacaaaaatgtgctgggcgtgatagtccacgcctgtaatccaagctacttgggaggctgaggcacgagaatcgcttgaacctgggaggtggaggttgcagcgagaccagatggcaccattacactccagcctgggcgacaagagcgaaactccgtctcaaaaaaaaaaaaaaaaaaaaaaagaactctattcccactgccatgctcaggtgagcagacagaggttgcagaggggatgagagatgcccttttaacttgcagagcgggaccctaactggcagcacgcaccaaccccataggtcctaccccactgtccaactgcctttgcccacaatccagaggcctttaaactgccataacttttacacttaagtgaaaggaccactgacagacaaggtcctttttctatttgctcactcagtagctcgttcctgaaaagacagaaattcccagccccacccacagctatggctgcttaaacccacagagagaggaacgaaatgcgctgggatggggatgaaaatctgaggtcagattcagacaagcacttaagaaatcggcttttctttttttttttcaggtagtggggcttaatgagaatttattaaagctgtgtgtcctcagtcagaaaaatgcacacccttgcaaagacagtacaggggattccctaaagcacagccgtggacccgcggagtaagagggcctgttctagagcctaggaggagttccaggctgcagggagcaatgatggcaccactgcactccaacccgggtgacagagtgagaccctctaaaaaacagagaacaaagccgggtgtggtggcttgtgcctgtaatcttagcactttgggaggccgaggtgggcagattgcttgagcccaggagtttgagaccagcctgggcaaaatccatctctacgaaaaaagatacaaaaattagccgggtggggtgtggcgcacctgtagtcccagctagttgggaggctgaggtgggagtatcgcttgagcccaggaggtggaggctgcagtgagctgtgatgctgtgatcataccactgcactccagcctgggtgactgagagagaacccatcttgggaaaaaaaaagaaagaaaacacgagggtgcctgttctagcctagctttctcctcaagctgcacacagataaacagaggctcagagtggggaagggtgacatagctaagattacagtgggtccggagcaaaaagaggctctcaacttgatttctggactcttcaatttagggctctgttaatgactattttattttggaatgacttgatgtgaatgacctaatctggaggcaatcttgcgcatgagtccgacatgatcactttcactgcagtttgaacctactaagtaacatatgcctcaatctttctctggctcatctccctccagacagctcaaaaccaaaatgaccctttaaaccttgaaacttccacatgcctacaggccagagaggtcagcaaactatggcccagaagcctaatccagctcgctgtctttgtaaataaagttttattgaaacatgctcatttgtttatggatgctttcatcttcaacagcagagctgaatagcagaacaaagaccacatggcctgcaaagcttaaaatacccattatctggctctttatggaaaaagtttgccaactcctgcagtacagaccatccctctaaattcaaacaattccaggcctggcacagtggctcacacctgtaatcccagcactttgggaggccgaggcaggcggatcatctgatgtcaggaattcgagatcagcctggctaacatggcaaaaccccgtctctactaaaaatacaaaaattagccaggcgtggtggtgcgcgcctgtagtcccatctactcaggaggctgaggcaggagaatagcttgaaccgggaggcggaggttgcagtgaactgagatcttgccactgcactccagcctgggcgacaagagctaaactccatctcaaaaaaaaaaaaaaaaaaaagaaagaaaacaaaacaaaatccagacagcctccaagcactcacaggtaccagtaaacacagagaatccccatgtcaagaatctttatctccactccataatccccaatcccacctacccctcaaatacttacagtccctgctgtaatctcagctcagtgttaaaaatatcactccacagcctccaaaacctatagatggctgtttaccaaccaccaattcacatacatgttgagtatctcaaatctgaaaatccaaaatgctcccaaattcagaactttttgagtgccaagatgacactgataggatatgctcattagagcatttcagatttttcagacttggcatactcaactgataagtataatgcaaatactcaaaatccgaagaaatccaaaatccgaaacactttttagtcccaagattttcgggtaagggatacttgacctgtataaccaactgcccagggaggcaggctaacacagcaaaagccagtctctacagatgccatcctgctacaacctggccaccccctcaagtcccctaatcagttccaaccttacccccagcatctcaatgtcctcccccaaatatcgaaaagctttcaaatactactttaaaccaccgaacctaaaaatatcctctccagcactgaagggccgaatctcagtcaatctctcacagatcccaacacagcaattccccaaactatgtcataaacaatcactctcccggaatcctatactccccccaaccctcctccattatctcccaattccactagaagcctccaacagcagacgaactctttgaaaacacaaaagctccctaacactttaagatgaatcttaaaccataaaaatgtttcacaaagccaaaaaaaaaaaacaaagaaacctcacaaatgttacaatagcagacatgtgcttactgcacgctcgctgcgagcttactaggtaggtactgcgctaacaattcctaatcctcctcggtccctaggaagcaggtagtgttattaatgcctagttcccgatgagacacaggtgaaatctcctgtccgggttaagacaggtaggaagtcaagacgcgagcccagacattccacctccaggactggtactctcgggctctttgcttctgtctctccgggagctccccaaattctatgcccaacaaacactccaaaacacaaagggaacccgatcccgaaaacacaaccgaaccttccgcattacaaacgaacccaaactccaaggtgccccttaagcgcgagagaaccccaaaagtatcccctaaacccacgttaaaacttccccaagccccagaacattttgcaaatggaaaaggaacccccaaatcttgtaaccgcccccccaaagaaatcttccaaacccctcaggtgaccctcgaaacctacacacgcccccaaagagccctcacccgcagcccccccaggcggcgggagaaggctgcagcccacacgcatgcgcgcgaaaggtaaaagggcccgccccctcgctccttccctccggccaccgcgcgggcagactagcaactagcttccctccgcccttttgttgacagacgcgcgcgtgacgctctcagccaatgagcggccgccattcggggccgtgcccatataaggcaggccttggcgaaggggcccaacttcgaaatagggaggagtaggcgagaggtgatgggagtgggtggtggggtagacacagccggatgcaagggagcgtggaacaactcccaacgtccagctaaacggaacaaggtcagggcaaaggccacgacactccaggggaggcttattacaccacgtcccctcgaacagaagccctgattgacgcttgagacttaaagggccaggcagcccggggattaagaacaccaaggcggaaggaagcaggcggagagatcagagtatccagctttggttgggaactgtgggggcggggggcgggctgaggatttccgcggggggaattgggcatcgggataaccccaccctgaaaaacaaatggacagaaccctacgaaggttcccacggcaactgaaaacaagcctctaggcctggcgttcaaggctcaagccgtgtagccattcggagctgccagttcagcctttccaaacaggcgccccaaacctgcctcacttagtacaaaagagcagccagaaaagtcctgttaaagcacagtcctataaacctgaacccgtccctatcctggtgagaacctgccatggctccccagtgccctctggaaaacacccaggtaccccacctgtccagtcgcatccctccccactcctccgccccgcaggcaataccccagtgcaccctggtgggcacctgatctggcatacatagaatactcaggacccatctgatccccggtaggagtgatcgtctccacggtatggatgaagaaactgacgcagggcaggtctcctgaccacaaggtcacacagagctggagtgtgagctggagcagggatatgaagccagggaatctgatttcctagtcactgtgccctactgtttcactatatattccctggggtttcagctcgaccacccctcctctaagaagctgacacccccaatccccctaggccaggtcaggcttcacccagggcgtccatgcggtgggctcattgctgtctattcctcaaagttaccgggctcttgccttccctggtctctgcatttgctgttcccaccaactgcaatacattccccctctgcaaggctcaattccttacttcattcaggtctgtgttcaaatgcagttttattagagaggccttctccaactcccttcctggaaatcacccacctgcccagaggggacctctgggttccctcttccctgcctactctgggtcatcgtctggggtgggtctctctccaggcctgagacaggatcttctaactcccccacactgagcccagcataaggccctacactaggtcagccttcagcaactactccatgaaaatctattcattgtaaaacattgtgaaccaaaaatatggaaaatcaaaagacggcaaaaaactggctgggaaaacacgaaccaagagacaagtagaggagtaacattaccccttaaaaaaaaaaaaaaaaaaacttggccaggcacggtggctcacacctgtaatcccagcactttgggaggcagaggggggacacaatcccttgagctcaggagtctgcgaccagcctgggcaacatggtgaaaccccatcactacaaaaaatacacaaattagcagggtgtggtggcacgtgcctgtagtcccaagtactcaggaggctgaggtgggaggattgcttgagcccaggaggtagaggctgcagtgagctcagatcaggccactgcactccactctgggtgacagcacgagactgtcttaaattaaattaaaaataaattaaataaataaaaaataaataaactgacaaaagcaatggatgatgacgaaacaaaatgaccaattatttacttctctacatgagtccctagggctgggggagggaggtggaagtgacccattatacacaaaagttctcaacatacatgatccaaatactatggcttccaaatagataaagcaaaaaacgaccatctctacacatgacagccataaacttacaaatgacaagggaaagtttgttaaatccacaattgatatgggaaaacaacatatttctaagaaaagactgcttgggaaaattagtaaggacctgaaccactcaatctacacccttggttgaatgcccccaacaattaaataatccacatatttacatccctagcatacatacatacatggtgcatttgcaaaaacttgtctctgacattcactgtggtcctgcatgctggccattgttgggcgctggaacacacaggtgacactgagctccccaggaatggctcatgggaaaggggtcagacatccaaacaaacagtcagaaccaacatgaatatattagaaaatgataatcacaacagcagtcaatactcgagcactctacaaatatgaacttgtttgattcttctatctcctatttttaatttcgtgttgaagataaggaaactgaggcagagaatggctaagtaattgccctcatttatagctttgtagcagaactctgtttttgtgagtgtgtgttttgttttttgttgttttctgagatggtctcactgtcacccaggctggagtgcaatctcgcctcaacgcagcctcaatctcctgggctcaagtgatcctcccatctcagctgccttcttttttgtttttttttttaagacggagtcttgctctgttgcccaggctggagtgtaacggtgcgatctcggctcactgcaatcactgcaacctctgcctcccggttcaagcgatttgcttgcctaagcctcccaagtagctgggactacaggtgtgcgccaccatgtccagataattttttcatttttagtagagatggagtttcaccatgttggccagactggtctcgaactcctgacctcaggtgatccaccccaccttggcctcccaaagtgttgagattacaggcgtgagccactgcacctggcctaatatttgtatttttagtagagacagggtttcaccatgttgatcaggctggtcttgaactccttacctcaagtgatccacccgcctcagcctcccaaagtgctaggattacaggtgtgagccactgtgcccagcctatcccagccttttgaggagctgaaaccacaggtgtataccagcacgcccagctaatttttacatttttttgtactgatgaggtctcactatgttgcctaggccagtcttgaactcttgaactcaagcaatcctccaccttggcctccccaagtgctgggactacaggcaggagcaaccacaccaagtcagaacttagaatcaaagatcagctgactccagagctcaaggtctaaactacaatataaacatcatcctggctgggcgcagtggctcacacctgtaatgtggtggcaggctcctgtaatcccagctactcaggagcttgagacaggagaatcggagaattgcttgaacccaggaggcgtggctgcaatgagccgagattgcaccactgcactccagcctgggtgacagagcaagactctcagccaaaaaaaaaaaaaaaaagaagtgaagcggggaaaaaaacaacagaataaaccaaacaaataaggaaaaataggccacgtgtggtggctcgcgcctgtaatcccagcactttgggaagccgaggcagacagatcgcttaagccaatgaatttgagaccagcctgggcaacatggcaaaaccccgtctctactaaaaatacaaaaattagccagcatgtgcctgcagtcacagctactcgggaggctgaagtgggaggatcgcttgagcccggaagtggagggtgcagtgagctgagattttgccactgcactccagcctgggtgccaaagcgagaccctggctcaaaaacaccaaaacagaaagaaagaatggaaaaataatgataaatggtaaagcgtagatgtctgaccccaccccacttccccatccccacccctagtcagatgaccccgctccccatcacagggccagggtcacacccagcacaaggcacttgcccagttacatgggaattggtggcaggacaccagggtttcgttcctggtcctgttcctttttttttttttttttttgacagggtcttgttctgtcacccaggctggagtgcagtggcacgatctcggctcactcgaacctctgcctcgtgggttcaagcaattctcctgcctcagcctcccaagtagctgggactacaggcgcccgccaccacacccggctaattatttatatttttagtagagtttcaccatgttagccaggatggtctcggtctcctgacctcgtgatccacccaaagtgctgggattataggcgtgagccaccacgcccggcaccaccccaccctttttttttctttttttgagatggagtcgtgctgttgcccaagctggagtgcagtaacacgatctcgtctcactgtaacctccacctcccctgcctcagcctcctgagtagctgggattataggcacctgccaccatgcccggctaattttcgtatttttagtagagacagggtttcaccatgttggccaggctggtcttgaactcctgatctcagatgatccacccacttcccgtagtgctgggattacaggcatgatgcaccgcgcccggtccctgttccttctatgccctaccctgctgctcctttgtccagaatcctgactcatccatacctcacccatggcttgttggccttagagtccactgggtcccctcccttttaagttttcctttctgactaatggtccctgaaggcaggaatcatccaagccctgagatcctggaagcagacaggaaccagacagggcctgctggatcccagctttcccacctctggcagtatgacctcaggcaggtttttcagccccatgtgcctcagtttcccccactgtaaaatggcaataatgacagcatccacccatgggctggctgaccatccgctgaaacaaacccagcagagcacctggtaccagtttggcactgaggcgtagctcacacctgtaatcccagcactttgggaggcccaggcaggcggatcacaaggtcaggagatcgagaccatcctggctaacacggtgaaaccccgtttctactaaaaatacaaaaaattagctgggtgtggtggcgggcgcctgtagtcccagctactcaggaggctgaggcaggagaatggcgtgaacccgggaggcggagcttgcagtgagccgagattgcgccactgcactccagcctgggcgacagagccagactccgtctcaaaaaaaaaaaaaagtgggctgggtgtgatgactcatgcttgtaatcccagcaccttgggaggctgaagcgggcacttgaggtcaggatgagaccagcctggccaacatagtgacaccttgtctctactaaaaatacaaaaaattagttgggcatagtgacaggcgcctataatccctgctactcgggaggcaaaggcaggagaatcgcttgaacctgggaggtggaggttgcagtgagctgagattgtgccactgcactctagactgggctacagagggagactccatctcaaaaaaataaataattaaacataaaaattgaaagtgaaggctgtgggtggtgactcatgccttaatcccagcactttggggggccagggcagaaggatcgcttgagccttggagatcaagaccagcctgggaaacaaagtgagaccacatctctaaaataattttttaaattggctgagcatggtggcatgagcctgtagttccagctactcggggaggctgagacaggagaatccgctgggcccaggagtgtgaggctgcagtgagctatgatcatgccactgcactccagcctgggcaacagaggtgggccctgtctctaagtaaataaatgaatgaaacacttgtggattacttagggaatgaacgctaattttccagaggaggaaactgacgtccaacgggatcaaattacttaccctaggtcacacagctgatgagaggtgaagccaggactcaaagctgggcactctggctttttcattttatttttgttttgttttgctttttgtttgagatgatctcacgctgtcacccaggctggagtgcagtggttctgtcacagctcaatgtagcttcaacctccttggccgccaagcccaactaattcttctttttttttcttagacgcagtctcactctgtcacccaggctagagtgcagtggcatgatctcagctcactgcaacctctgcctcccaggttcaagcaattcttctgcttcagcctcccgagtagctgggactacaggcgtgcgccaccacgcccagctaatttttgtatttttagtagagacagggtttcaccatgttggccaggctggtcttgaactcctgatctcaggagttcaagaaaaaaaaaagaaaacttgtgcttttaggagtaagacagctttaccatagcagttagaaatacatcattaaacgtggtaaaaaatacaatttttttcttcgtttcctagtacatgtcacaggttttgaaataaagatggtaaaaataccattttgtatgagtaagcttcagacaagcacaggctgaaaacaaatttaagatttcaagaaaaggcaaaataacttggaaagcagacaaatgctctaagacaaataaatgaaggcaacggaaaacaaaaaagtgtcagatcaccccagggtggccagatgtgacacataggatcagggacaagtgagagactggcaacttttccccaaaccaataggttttcagataattcaatgagggctggagacagaatgttaaaaaatccatgaaagcagtgacaagcaggccaagctggcataaggggctgaaaatgaattgggaatagagaaacccaaacttgaaaatgagcacaaatgctcgcatacttgcagaactgccctaccattatgacaacagcaagttccccaatggcagggtcgagtctgcacccaatacaggcgctggcacatggtaagtgctctattaacacttgtgggctgggctctgtggctcatgcctgtaacccagcactttgggaggccgaagtgggaggatcacttgagtccaggagtttgagagcagcctgggcaatatagcaagaccctgtctctacaaaaaaaaaatttcttattttttctgttcgagacggaggcctgctcgttacccaggctggagtgcagtggtgcaatctcagctcactgcaacctccgcctcctggggttcaagtgattcttgtgcctcagcctcccgagtagctgggactacaagcacacgccaccacgcctggctaatttgtatttttagtagagatggggtttcaccgtgttggccaggctggtcacaagctcctgacctcaagagatctgcccatgtaggcctcccaaagtgctgggattacaggcatgaggccactgtgccccatcaacaacaaaattttttttttaattagctgggcatggtggcaagcacctgcagtcccagatactctggaggctgaagcaggaggatcacttgaggccaggagcttgaggctgcagtaagctgtgactgcaccactgtactccagcctgggcaacagagacaggccctgtctctaaataaataaataggctgcggtggctcaaccctgtaattctagcactttggaaggctgaagtgggtagatcacttgagctcaggagatcgagaccagccttggcagcatgtattattcatctctacaaaaattacaaaaattagccaggtgtggtggcatgcccctgtagtcccagctattttggaggctgaggtgagaggatggcgtaagatcaggaggtggaagtcacagtgagccaagatagtgccactgcattccagcccgggcaacagagccagaccctgtctcaaaaaataaatgaacaaataaataaataactaaaacacttgtgggccaggtgcggtggctcacacctgtaatcccagcagtttgggcaggtcgacagcttgagtctcattgttcaggactagcctaggcaacatggcaaaaccctgtctctacaaaaatttttttaaaaattagccgggcatggtggtgtgcgcctgcagtcccagctacttggaaggctgaggtgggaggatggcttgagcccgggaggtagaggttgcagggagccgagactgtaccactgcactccaacctgggcaatagagccagactttgtctcaaaaacttaaataaaaatgaataaataaacacatggactacttaaggaatgaaccccattttccagattcaaagttgggcactctgactccagagtgcatttttctccctgttttctttttgttttgttgttgctttgatttttttgtttgtttgtttgagatggtctcgctctatcacccaggctatagtgcaatggggcaatcagagctcactgcaccttccacctcctgggcccaagtgatcctcccgcctcaacctccagaggtgctgggactataggctcatgccaccaagcctgactaattttttaaaaaatttatttgaggctgggtgcagtggctcatgcctgtaatttcaacactttggaaggccaagacgggcggatcatttgagcataggagttcaagaccagcctgggcaacatagtgagaacccgtctctacaaaaaagatacaaaaattagctgtgtgtagtggcatgcaactgtagtcccagctatactcaggaggctgaggtgagaggatcacttgagcccgggaagttgaggctgcagtgagctgagatcgcaccaccgcactccagcctaggagacagagcaagactccatctaacaacaacaacaaaaaaaatggctgggcacggtggctcacacctgtaattctagcactttggaaggttgaggcgggtggatcacttgaggccaggagtttggcaccatcctggccaacacaacgaaatctcgtctctactaaaaatataaaaattagcagggcatagaggtgtacacctgtaatcccagctacttgggaggctgaggcaggagaattgcttgaacccaagaggcggacgttgcagtgagccaagatcatgccactgcactccagcctgggcaacaaaacgagactgtctaaaaaaaaaaaaattgtttgtagagatgaattttccctgtgttgcccaagctgatttcaaactcctgagttccactgatcctgccaccctgttaatcccagcctcccaccttggcctcccaaagtgccaagattataagcatgagccaccttgcccagcctcagtaccttttcttgaaagaataaaaatcatagaaagacctcacacttattgagagcataatacaccccaggcattttatatatgccacctcatcagttaccacgtcaactccttacgagaagctcagagtttaaatgtggtcccatttttacatgagaatactgaggctggctgggcactggggctcatgcctgtaaccccagcactttgggaggcctaggcgggtggatcacttgaggtcaggagttcaagatcagcctgggcaacgtggtgaaacgctgactctacaaaaattaggcaggtgtggtgacacacgcttgtagtcccagctactcaggaggctgaggtgggaggatcccttgatcctgggaggtggaagttgcagtgagccaagatgatgcccctgcatgccagccagggcaacaaagtgagaccctggttcaaaacaaaaaaaaagaaaaaaaaaaagaggtcggagcagtggctcacgcctgtaatcccaacacttagggaagtcaaggagggtgcatcacctgaggtcaggagttcgagaccagcctggccaagatggtgaaacctcatctctactaaaaatacaaaaattagctgggcgtggtgacacaagcctgtaatctcagctacgcaggaggctgaggcagaagacatcatttgaacccgggaggcggagattgcagtgagccaagatcacaccactggcctccagcctggacaacagtgagactctgtctcaaaaaaaaaaaaaaagggaaaagaaaactgaggcccagagtgggaatgcagcttggccaaggtcacacagcaacagaagcagggttttgaccctgcgcctctctgaagccagtgttttcaaccataagcttactatcacagccaatgaattaagcccagaaagctcacaataaaccaaactgtttcaaggtgaatttacaaagttgtcaaactgcccaatgaggccttaatgacccaaaagttaaacgaacaaaagcaaactaacaacaacaacaacaagaaaaacctagttagaaatattttctcttcactgaaacacctggagtaaggccagactgggtatttggcggggacaggaatgggaatggggacacactgagtttccttgttctttttttttgagacagtctcactctgtcgcccaggctggagtgcagtggcacaatcttggctcactgcaacctccacctcctgggttcaagagattctcctgcctcaggctcctgagtagctgggactacaggcgcccgccaccacgcccagctaatagagatggggttttgccatgttggccaggctggtcttgatcaaactcttggcctcgggcaatctgcccgcaatggcctcccaaagtgttgggattacaggcatgagccaccatgcccagcccacagattgagtttgtaagcacactctccagaagtcgtaattggatttaggagcccagaggtggagggcagggacatggtgacaacatgagagagaaaggagacagcctgacatcttccctcttggttcctctctactgccttctctttcccactgacattcaaaaacaacaactcacacgtactgagcccttccataagtattggagtaagggctcataaagtaagttccactatactgcattatcttcccgaaacttctcaccttcctagggttactgatcccattttataggtgagaagaacccaaaagaagaacccttgcccagggccaggcgtggtggctcacgcctgcaatcccaacacttttggaggttgaagcaggaagaccccttaagcctaggaatttgagaccagcctgggcaacaaagtaagacccgcgtctctacaaaaataaaaataaaaaattagccgtgtgtaataaaaaattagtcccagctacttgggaggctgaggtgggaggatcgcctgagcccaggaggttgaggctgcagtgagtcatgattgcgccactgcattccagcctgtctgggcaacagagcgagaccctgtctttaaaaaaataaaaaggctgcgcgcagtggctcacgcctgtcatcccagcactttgggacgctggggcgggcagatcacctgaggtcgggagttcaagacctgtctctactaaaaatacaaaattaaccagacgtggtggcgcatgcctgcaatctcagctactcgggaggctgaggcggagaattgcttgaacccgggaggcggaggttgcggtgagccaagattgcactccgcctgggcaacaagagcgaaactccgcctcaaaaacaaaacaaaactaaacaaaaaaccataaaaataaatatagggccaggcgcaatggctcacgcctgttaatcccagcactttgggaggccgaggcgggtggatcacctgaggccaggagttcaagaccagcctgaccaacatgcagaaaccctgtctctactaaaactacaaaaattagccagggcgtggtggcacatgcttgtaatcccaactactcaggaggctgaggcaggagaatcgcttgaacccgggaggcagaggctacagttagccataccactgcactccagcctgggtgacagagggagactgtctctaaataaataaataaaaataaataaaagacttgcctaaggtcatatagcaagtaaatggcagaactaatattctagactgctttgttcgctgtctctactcatcacattgtatatttcagtatggagagaggactaaattatagtgctgaaagcacagattctgagccaggctgccaagatcggaatcctgagtctagcaattaatgctggatagccttgggaaagttgcttaatttctctgtacttctgcttcctttctgtaaaatggagaaaataacagcacctacccctcaggggtgttatcagaattaaatgagttaatgtgtacaaacagctaaggacagggccaggcattttgtaaaacaataagcgttagctgtaatccacagtggggagcccctacatgcttctgagctggggtgtgtgcccagatcagtgccagcttttgagaaaacgcctctgggactggactggaaaggaggaaatccattagcacctgtaacccagtcacattccgggggcggagaacttcccaccaacagctctgagactgaaacttcacagcccagctctcccactaatagtaacgattttaatgactccctttaaccctgttctcagaggcatgcttgctgttcccatactacagataagggcactgaggctcacagatttgtccatggcacaaaggggtggaagaataggggatatgaatgctgtacttctcatagggataaaccattacactcttctaaattccaccggggaagtgagggtgcgaaagcctgtctcgatggccctttctggccgtattatcctacagttctgtgcctgtccagcttaccgggagtctctggcgggactagggaaattatcactacatccaggcccctaatttcacgctccttaccccaccctcagtcctggagcctaaacccacactctatcctaccactgatttctccctcctacctcctcaacttgccttcctgcccccaatccgatccagaggccccaacccattgcgtccaccgttcgcctgtcccttggagcttccagaccccctcactcatcctaaccctgatcctcataccctcgccgcaggttaagcccccatcgaaatcgaccccttcagggcctctacctggatgtccagcccagtctccaactcggggcccacttccccagctctgagcccctttacaatcaattccaaagctccactcccaccccacctccaagacccctccccaagccaccattcttctactactacctccggctcccattcctcccagtcctctcccccaggcaatctcccctcacccagccccttctttcgcccctgcctcttccccctcgtcacccggtcccgaacccccgtcccgactctccagcgcccccggcccgcgcctgggctctcaccatcgccgcgcgctgcatctccctcggctacgcgggtttcccccactcgctcctctccagcctccccttccgggttctcgtcccgaagcccgctgggaattgaagtccgggcagccacggactacatcccccagaaggcagcacggtcaagcttggaggtggggtaggaagcaaattaggcgggcggaggaaaagaacgactcgaactcccgggagacaaagccggggaggacttggcagcgcaagcgcagggtgcttccccgctgggcgcgctgggagatggagtctagccaggagggctccatttttgcccgaggcccttgggaagggaattgagaatattgcaatagggtgttggtgaggggtggagagttggggaagagcaaatttattgattcatttgtgccgatcaacacaatagctaacagctccttgtgcttttccaaactccttcccatccatccccttctttttttttttttttttgagacggagtcttgctctgtcacccaggctggagtgcagtggcgcaatttcggctcactgcaacctccgcctcctgggttcaagcgattctcctgcctgagcctcctgagtagctgggattacaggagcccgccaccacgcccggctagtttttgtatttttagtaaaaacggagtttcaccatgttggtcaggctggtcttgaactcctgacctcatgatccacccgcctcggcctcccaaagtgctgggattacaggcgtgagccaccgcgcccggcccgtcccctcctttcttacctcctgatttacaaatgagaaaattaagccttaggaggaaggaaagtcccatacattaggagttagtccacatcatagaatagcagctccacatcgctcgagcccaggagttcgaggcagtgagctagtgttacaccaccgccctccatgcagttcagcctgggcgacagaatgagaccctgctgcctcttaaaataaaagaaggccgggcgcggtggctcacgcctgtagtcacagcactttgggaggccgaggcgggctgatcacaaggtcaggagatcaagaccatcctggctaacacactgaaaccccatctctactaaaaatacaaaaaattagccgggctgggtggcgggtgcctgtagtcccagctactcgggaggctaaggcaagagaatggcgtgaacccaggaggcggagcttgcagtgagccgagatcgcgccactgcactccagcctgggggacagagcgagattccgtctcaaaaaaaaaaaaaagaagaagaagaagaagaagctccaggagggcagagatctttgtgtaccttgttcaagcacctagaacagcgtaaacatgtgttcagtaaatatttattgcatcggaactatatgccagacaccctacagacaaccctggtaggaattacaatcccaaatttataaggcagaaagagattaagcctcttgtcgctggcaacacagccaagaaaacgatttgaactgaaatgtattggatttcagggtttctactcttgactaggtcgttagatcatctccccttaagacgtattttccaggctgggtgcggtggctcatgcttataatctcagccgggagactggctttagtccaggagtttaagaccaaactaggcagcaaagtgagaccctcgtctctaccaaaaaaaaaaaaaaaaaaagcccaaatcttttattctttttctttcttttttttcctttttttttttttttttttttttgagacagagtcttgctctgtcgcccaggctggagtgcagtggcgataccagctcattcaacctccacctcccaggttcaaatgattctcctgcctcagcctctggagtagttgggactacaggcgcgccccaccatgcccggctaatttttgtatttttagccgagacggggtttcaccattgttggccaggctggtctggaactcctgacctcaagtgatccgcccgcctcgtcctcccaagaaggcccaattcaaatggccctcctctttgaatcctttcccaacgtattgttctctgcattaaccgagttcccgtctcaccggattctcatggtctcggaggttctcacggtcttctcgattgtactgggaagacagtggctaagttcccaccatctagcctggtgcttggcacacaggaggccctcatgaatcacgaactgaagggaaaaggtggaaatgggacatcatagggccagaagggacacaggcgagctcgctctctctctcttcctgagagttggcagttgaggaaacccagcctacttgggatgcaacggccctggaccacgcgggtcgtgcaggggcgtgaccgcttaaaaaggcgggtggctgagcgggcgctgattggtcacctagcggctcacgccgaccaaggccttgtcagaaggctcgaggccgagctcacgctgtgcaagacgacagggcccttcccgaggcgcgcgtgcgcacggccacttgcaccctgccctttcaaccccgtcgtctcgtgcccagcacatcttggctggaactggtaggggcgtggcctggcctcaggaacgcactcttgctctgctcctcacgcctcgcgcaggatcctcgcgccgggaggattcgcacccaaccccaagcccggttgggaacgtggtgtccgagaccgtctgggatccccgcgcgcacggccggcttcccgggacccgcgcgagacgctgtctgatcgggctccctagagtggggcccggagaaaccagaacggcgggggcagcctcacgccattttgcacgccctgaggcgggtgctggaggccaaggggaatggggcgcggggcagggggcctcccccagcactagctgggcttaggggaacccgggatccccacaggagcttccctcggtggggggctcaggggaatagaacatgctctgggtgcagggccacgggcgacggagtttgggtttgaagccgggggtccaggttcgagtttgaggaacggaagactctgtttgtgttgggaatccgggctctcgagttctgatctgggatctcgggatttgtgtctaggggtgactagttctggaatctgaagagcttgagttttgtgactggaagctttctccttggaatccagagatcccaatttggggatctggaagtcttagttctgagttatgatgtaacattttgagagtctggagcctgatttggggcaactgaagcctcagtatagatttagggcctaaatcccaatgtagagtatgaagctttaggatctggagtcgcagtttgagtctttagaagcacgttttagggcctggagtgcccacattgagtatgggagctccagttttagggtctggggtttcagagtaggacccacattcgagatctcagttttagggttggggccacaatttgagggacagtttggacgtctaagaggtcaatctggagaagtgagatttgtttcataggggcctggatttcttatcttaggatataggttcatagtgttacagcttgcagtctgtaatcttagtattaggatcatatttgaagatcagaagttgacagtttgagggtctggggtatctcagtattagaatttagggtttgtaggtttgggagggctcctttttttttgtttttgagacaaggtctcactttgtcatccaggctggagtgcagtagtgcgattttagctcactgcagccttgacctcctgggctcaaaccatccccccacctcaggctcccaagtagctgggactacaagcatgtgccactatgcccaggtaattttttttttttttttgtagaggtggagttttgtcatattgccaggctggtctcaaactcctgagatcaagcaatcctcctgccttggcctcccaaagtgctaggattacaggcgtgagccactgtacctggctttgggagggctccaaagtgaggatttaggtcctcattttgggactctaaagtattagttttagtgcctttttagaggtttaggggtttgtttttgtttttgttttttgagacacagtctcactctgttgtccaggctggagtgcagtggcttaatcctggctcagtgcaacctccgcctcccaggttcaagtgattctcctgcctcagcctcccaagtagctgggattacagtcgtgcaccaccacgcccggctaatttttgtatttttagtagagatggggtttcaccatgttggccaggctggtctcaaactcctgacctcgagtgatttgcctgcctcggcctcccagaatgctgggattacaggtgtgagctaccacttctggccaaggtttagctgtttaatttgggtctttgggcccataatttgttggggctagggactcttattttgggatctctgggtgctcaaaggagcatcatagggaagatgaagggtgcccatcagggttcctgcccatccttcctgcaatcccagaggtcactaatcattctttttccctctttgcagatgtttggttccagcagatacttgggttcctctgaacagcccagagctaattcactgggtcccagtgacaggtaagggcttgccccatctcccttatagccccagccactctcattgaataataataacaaaaacatttgctgagcatttaccgtttgctagactctttgccaaacattttgtttgtatgataactgttaatccatacaacaatctcatgaggaagttgtgtacaaagatgcctaccattttccagatgagagtactctgaggtgatcggcaaagatcattgcttatttatttatttatttatttttgagacagggtttcactcctgttgcccaggctggagtgcagtgttgcgatcccagctcactgcaacctccgcctcctgaactcaagtgattctcctgcctcagcctccccagtagctgggactacaggctcatgcctccatgcctggctaatttttgtattttttgtaaagatagggttttgccattttccccaggctagtcttcaactcctggcttcaagtgatctgcctgtctcagcctcccaaagtgctgggattacaggtgtaagccaccatgcccagcccatttctttttttatttttagggcaaagataacttctaaggtccttgcagcctgtgacattctgagtttgtttgttttcagagttagggtatcactctgttgcccacgttagagtgcagtggtggcatcatagctcactatagcctcggactcctgggtttgagcctgggcttgatcctcctgcttcagccttccgaacagctaagattacaggcacatgccaccacacccagccagtttttctatttgttgtagtgacagggtcttgctatgttgcacaggcctgtcttgaacttctggcctcaagtgatcctcctgtcttatcttcccaaagtgctggaattactaagccaccacgcccaactgacattctgagtgtctttctttctttcctttttttttaagacagagtctaactctgatgcccaggctgtagagtgcagtggcgcgatcttggttcactgcaacctctgcctcccaggctcaagcgattctcctgcctcagcctcccaagtagctgggattacaggtgcccaccactatgctcagctaatttttttgtgtgtatttttagtagagacagggtctcactgtgttggccaggctggtcttggactcctgacctcgcgatccgcccgctggagtgcagtggcgtcatctgggctcactgcaagctcaacctcccggattcacgctattctcctgcctcagcctcctgagtagctgggactacaggcgcccaccaccatgcctggctaattttttatattttttttagtagagatggggtttcaccatgttagccaggatggtctcgatctcctgacctcgtgatccgcccacctcagcctcccaaagtgctgggattacaggcgtgagccactgcgcccagcctttttttttttttttgagatggagtttcactcttgctgcccaggctggactgcaatggcatgaactcggctctctgcaacctccgcctcccgggttcaagcgattctcctgcctcagcctcccgagtagctgagactacaggcgcatgccaccacgcccagcaaatttttgtatttttagtagacatagggtttcaccatgttgttcaggctggtctcgaactcctgatctcaggtgattcacccgcctcggcctcccaaagtgctaggattacaggtgtgagtcagcaagcctggcttctttcctttttttttttttttgaaacaaggtcttgctctgtcacctaggctggaatgtggaatgcagtggtgcaatcccagctgactgcagcctcgaccttctgggctcaaacaatcttcccatctcagccccctgagtagctgggaccataggcgtgcaccaccacgcctggctaatttttgtatttttcgtagaaatgggtttttgccatgttgccgaggctggtctcaaactcctgggatccagtgatccacccagcctcccaaagtgctggggttacaggcatgagccaccacgcctggctctttctttttagacagggtcttgctctgttccccaggctggagtgcagtgacacgatcacagtttactgcagctttgacctcccagactgaagcagtcctcccacatcagcctcccaagtatgcaggaccacaggcacacgccactatgcccaactaattaaaaaaaaaaaaaattggccaggtgtggtggctcacacctataatctcagcactttgggaggccaaggtgggttgatcacttgaggtcaggagtttgagtccagcctggccaacatggtgaaactccatctctactaaaaatacaaaaattagctgggcatgatataatcccagctacttgggaggctgagacaggagaatcgcttgaacccaggaggcagaggttgcagtgagccgagatcgcgccattgcactccagcctgggcaacgagtgaaactctgtctcaaaaaaaaaaaaaaaattgtggacagggtctcaccatgctgcctacactggtctgaaactcctaggctcaagtgatcttcctgcctcagcctccaaaagtgctgggattacaggcgtgagccaccatgtctttacttcctttcttttattcacgcattcattcatccatcaagcacttaccaagtgtaatgaatcttatagagggaattttcacagcagattggaggttggatcagatttctccctccctccaaagtctggataaagaaaaaataaggccaaagttcatattaacccctaccatctcccccagtgactttccatccaactatctcttcattaactccaaaattaagcatctacggggttatgtcctgataaacccatcataaactgaaaatattgtatgtcaaaaatgcatggttgatggctcaggcctgtaatcccaacacttggcgaagccaaggtgggctgatcacttgaagtcaggagtttgagaccagcctggccaacagggcaaaaccccatctctactaaagatacaaaatttagccaggcatggtggtgtgtgccggtaatcccaagctactcaggtggctgaagcaggagaatcacttgaacctgggaggcggaggttgcagtgagccaagatcgcgccgctgcgctccagcaacagagcaagactcagtctaaaaaaagaaaaaaaagcatagctgattgggagctgtggcccagtgttgctgcccagcacagtaagagaagtatggcttctactgaatttgtatggctttcacaccattgtaaagtcgaaaaatgttaagtccgactgttgtaagacgaggactgtgtgctttgtttaggttctctacctagatactatgctcagaagaagcaccatgaagaaaatgaagaatgcctatcctgctgcccattcctcctggaattttagagttgccacaattcatactttcatccccctttctagatgtgggggtccttgtattgataaagactgttagttgcgaagaacagaaacctagcaaaaactggcttaagcataaaaagggatttattggatcatttaaacaaaaaattcagggatgtcggccttggctggttccaggatggaggttaaatgatgttgccgggaatctgcgtctcttggctctggtattgtctgtgttggcttctgtctcaagcaggttctccctttgctttatttatatattttatcttattgtttgtttgtttgagatggagtcttgctctgtcacccagactggagtgcagtggcatgatagctcagcgcaacctccgcctcctgggttcaagggattctcctgcctcagcctcccgagtagctgagattacagacatgtgctaccaggcctggctaattttctcatagttttagtgaaaacggggtttcaccatgttggtcaggctggtctcgaactcctgacctcaaatgatctgcctgcctcaacctcccaaagtgctgggattacaggcgtgagtcattgtgctcagctgcaggttgtccctttggaagggcaagatggttcccagcagttccaggtctatatcttgccaactccatatacccagaagagaaaacatctttctaagattgattgactctgattggccaaacctaggattaccactccaaccctgaaccaatcactgtgactattcttggcaggaccttggttttgtgctccctagtggaaggggaagataaggtcaacccctccgaaccacatggactgagaatggaggagaaatggttgctcaaaggaaaactgaggtactgttaacagaaaaggggggattggatgttggccaagcaaaaacatagcccattgttcaacacctcttacccctaaaatcattctgacaaatgactgtacacacatgctttctttcttcctttttttttttgagacagagctttgctcttgttgcccaagctggagtgcagtggcgcaatctcggctcactgtaacctctgcctctagggtttaagtgattctcctgcctcaacctcccgagtagttgggattacaggcacgtgccaccacggccagctaattttttgtatttttagtagaaacagggtttcaccatgttagtcaggctggtcttgaactcctgacctcaggtgatctgcctgccttggcctcccaaggtgctgggatacaggcgtgagccactgcacccagccccacacgctttcttgaactaacatttcatgaacactccctatgtaccaggcactatacgaaacaccttccagataagatcaaggttttcctagccacctccattttgtaaaggaggaagaaacaggcacagagaagtgaaagcagttgcccaaagtcacacagcaagcggaggaactaggatttgaatcccagtctttctgcttcaaaaactggagcttatatatcaacctttatgccacctcctgggactgtcccctgctttgtcccactttggggcagctcttactcttacatccctacacactattaaaacaaatgaaggccgggcacggaggctcacgcctgtaatcccaaaactttgggaggccaaggcggatagatcacgaggtcaggagattgagaccatcctggccaacatggtgaaaccccgtctctactaaaaatacaaaaaattagccaggtgtggtggcacatgcctgtaatctcagctactcaggaggctgaggcaggagaatcgcttgaacccaggagacggaggttgcagtgagccgagatcgtgccactgtactccagcctgggcaacaaggcgagactccatctcaataataataataataataataataataataataataataataataacaatgataataaagtaactagggtatgttcaggttgattagctcagggaaaaggaaacttgagaattaggttcatatgccactttagaagtctgagcagctatcccaagacctttcagtattcattaattcaataattctttattgagcacccactaagtgttaggcattattccaggacttaagggatataaccagcgcagcattatggcttctgtgggccctatacaattttaccttcttgatccccttcttccatagaaaaatattaacgctgggtgcggtggctcacgcctgtaatcccagcactttaggaggccaaggcgggcagatcacgaggtcaggagttcgagaccagtctggccaacatggtgaaaccccgtctctactaaaaatacaaaaattgggaggcatggtggcgggcacctgcaatcccagctacttgggttgctgatgcagaagaatcgcttgaatctgggaggcggagatttcagtgagctgagatcgcaccactgtactccagcctggacaagagcgagactctgtctcgggggaaaaaaaaaagaaaaatattaacaattgtggtttatgatagtattgatatgaagacaagtatactacagatggggtgatatttattttttgttctaatttaaaaggaattagaatattttcatgagcccctaaaagtatcatgggttccaagcactgtgctttctgcattttatggataaatcagcctgggatatagcaataaataagacaaaaattcttgccctgtggcgtgtgcctgtaatcccagctacttgggaggctgaggtaggagaatcactctagcccaggaggtggaggttgcggtgagccaagagcctgccactgcactccagcctgggcaacagagcaaaactctgcctcagaaaccaaccaaccaaccaaccaattcttgccctcatggagttcatatttataattaataaattaatgaaagaaataagatttcacagcctgtacaatatagagagaccgcgtctccaaaaaaaaatttattttaaagtttattttattttatttattatttatttatttattttttgagacggagcttttgctcttgttgcccaggctggagtgcaatggcacgatctcggttgctcactgcaacctccacctcctgggttcaagtgattctcctgcctcagcctcccaagtagctgagattacaggcacctgccaccacacctggctaatttttgtatttttagtagagacaagatttcaccatgttgatcaggctggtcttgaactcctgacctcaggtgatccacctgccttggcctcccaaagtgctgggattacaggcgtgagccaccacgcccagcttaaaagttttttgtagatgcagggtctcactatgttgcccaggctggactcaaactcctgggctcaagggaccatcctgccttggcctctgaagtgctgggattacaggtgtgagccactgcacccagccttgtctctacaaaaaaattttaaaaatagcctggcatggtggtgcatgcctaaagtcccagctactcgggagactgaagcagaaggattgctggagcccaggagtttgaggttacagtgagctatgattgtgctattacatatgagcttgggtgacagagcaactcgttgtctctttaaaaacaaacaagcaggccaggcgcggtggctcacgcctgtaatcctagcactttgggaggccaaggcggacagatcatgaggtcaggagattgagaccatcctggctaacacgatgaaaccccgtctccactaaaaatacaaaaaattagccaggcgtggtgtcaggcacctgtagtcccagctacttgggagactgaggcaggagaacgtgagggtgaggctgaggaggcgtaatcccgggaggcggagtttgcagaagctgagatcgcgccactgcactccagcctgggtgacagagcaagactctgtctcaaaacaaacaaacaaaacaaaacaacaacaacaacaaccagggcaacagaacattccaaacagagaaggcagaaataaaattggcagttgagagaaacagaaagaaaacctatgtgactggagctgacctgttccctgaaaacccagagggcacagctgggattagtggatgcaaatatacagactgtgagggaagaaattggctaaaacccgaaccatccagcaaagaaaagaggcagctctgggaggtggtacatggcttctggagggccctgagagcggagcccaggttgtacttcttcaggactactgcccagacactggggatgccaagacattgggattcccatccactcagttgctccctttctaacctctgtgtttacccagaaggttcaccctgtgctttgtaaaacccagaataaacacccagggactatggtttatatgaaaccctctgagacggtcaaataacaccttgaactttataagtagacctggacactttttcttccttgcttcctgagttgtttcttgtcgggtctgccaagggcccctctagaacacatgggaaataatgtgatatatatatatttatttatttatcagggctagacaggagtttaagctcagcctactcaatttatctcgaaggatagaaccccaacacccccttggctcaaagttatcgtttctaccaggaggtaacttggggactcatcagtgattttttttctttttttgagacagagttttgttctgttgcccaggttggagtgcagtggtgcgatcttggctcactgcaacctgtgcctcctaggctcaagcaattctcctgcctcagcctcccgagtagctgggattacaggcacgtgccaccacacctggctgatttttgtatttttagtaggaacagggtttcgccatgttggccaggctggccttgaactcctgggcccaagtcatctgcccacttcagcttcccaaagtgctgggattacaggtgtgagccaccatgcccagccaactttttattttttcataaaggcgaggtctcacttttttgctcaggctggtcttgaactcctgggctcaagtgatcctcccaccctgacctcccaaagtgctgggattacagatgtgagccaccacactcagtcaaaagcaaagcatggcctcttcatgtattggtgacaccacacttgccacttagcatttagatcaatttccttttacaagcttcttatttttactttttttttttttttgagacagtctggctctgtcacccacaatctcagctcactgcagcttccgcctctcaggttcaagcaattctcgtgcctcagcctcctgagtagctgggattataggcatcatgtccagctaatttttgtatttttagtagagatgggtttttgccatgttggccaggctggtcttgaactcctgacctcaagtgatcagcccacctcagcctcccaaagtgctgggatgacaggtgtgagccaccatgcccggcctccttttacaagtttccataacaccaagcaacacttttttctttatcacggctagcttcatagacatatgacctgggcagtcacatagggccctgtgcttaggatggtccaatgcttggtttgatgctctgctctcagcatcttttttttgttttgttttgttttgtttttgagacggagtttgttttgttttgttttgttttgtttttctcctgcctcagcctccccagtagctgggattacaggcgcctaccaccacgcctggctaatttttgtatttttattatttatttatttatttattttgagacggagtcttactttgtctcccaggctggagtgcagtgatgcaatcttggctcactgcaacttccacctcccgggttcaagggattctcctgcctcagcctcccaaagtgctgggatgacaggcatcagccactgcacccaccccacattaggaccttaaacttgatccttaacaatgggatgtcatggagaggtttgaagcaagagagtgacgtggtcagatttgtgtttcagaaaggtcaccctgactctagcagacagtagggatggaagaggccaaatggcagggttgagtgaactatcaggatgttaacacatggactagggcagggctgtggggttgaagagaaggtcatggaagaggagtgggtaagatttggtgactgactgattaagggctaagggaaagtaacaagtacgggtgatgcctgggattctgtcctcggtgtccagggtggggtgcgggcagccctaaaatgagtaacacagacaggaggtttgcgggttggatgtggaattcgttttggatgtcctaaccaaaaccagctcctgtccccaaacaggaatcagaggaaccaaaacaagctcctgtccccaaacaagaagcagaggaaaaaccacactagcaagctgcaagagttggcactgctgctgcccatagccctgaagacggggaccaagaagctcacaaaggtacagggactagaggagaggggccagatttgggacgcaggtctttaaatagcagcaaatgggtcaccctctcctgggaaacctggacagatcctttcagtggcagcattcaaatgggaatggtgctactctgaacgggaatttccgggagtctgtgatcccataactaggtgcctggaggatccttttttgcaaaggagagaggagaaaccgggctggggaaatagagatagcacaaagatcattgttccaggaatcaaatagccatgggtttgagccctctagcttcacagctacagaactctgggcagtttctcaggctacccagactttctttttttctttgttcttttttgtttttgagagtcctgagtagctgggactacaggcacaggccaccacacccggctaatagtttttttgtatttttagtagagacagggtttcaccatattggtcaggccggtctcaaattcctgacctcaggcgatccatccgccttggcctccgaaagtgctgggattacaggcgttagccactgtggccagccaaatttattctcttatggttctggagttcagaagtccaatatcagtctcagtggctttttcacttgtttggttgttttggggtttttaggttttgttttgttttgttttgtttttgagacaggatctcactgtctcacccaggctacagtgtagtggctcgacctcagctcactgcagcctctgcttcccaggctcaagcaatcctcccacctcagcctcccgagtagctgagactacaggctcatgccacacctggctaattttttgtagttttggtagagacgaggttttaccatgttgcccaggctagtctcaaactcctgacctcaagtgatcctcccaccttggcctcccaaagttcggggattacaggcataagccactgcacccagccagtctcactggtttaaagtcaagttgtcagcagggttggttcctcttagaagctctagagagtttgtttcctttctttttgccaacttctgggggctgcctgcattccttgacccatcatggtccctcaaagccagcatggaagcatcttcaaatgtctttcctgtcctaccgcttctgttgtcacattgccttccctgcctttgacattcctacctctgtaagattatatgtgattacactgggcccacccagataaacaggaataatcaggccatctcaagatccttaacacagcgggctcagtagtttgggaggccgaggtgggtggatcacctgaggtcaggagtttgagaccagcctggccaacatggtgaaaccccgtctctactaaaaatacaaccaattagccaggagtggtggcgcgtgcctataatcccagctactcaggaggctgaggcgggagatttgcttgaacctgggaggcagaggttgcagtgatccgagatcgcgccattgcaccccagcctaggcaacagagcaagactctgtctcaaaagaaaaaaaaaaaaaaagatccttaactcaatcatatctgcaaagtcctttctttctgccatacaaggcaacatattcataggttctggggactaggacatggacatctttggaactttggggggatgcattatacagtccacgatggtgctaaaaatatttgaggaatgtgagtttttggcatgcataggtgctggaatagcccttggggagccagagatgactatgacacagtccctcccctcgaggaatggcagtcttgtcaggggactggcaacgtttcataaatgaccggatggccacatctcttggaattctccccaggcctcagcctacttatttaccatgtgtcctctgctgtcttcagaacccctcttctcccacctcttcatccttccctcagctgcatcatggggtcctgctccacagacaacccgcatcccggggccgtgggacatgctcagtccagtgctccgcgccatagcaggagctgtgagaattgcctctcctgtgttagagacttggggtgcagctttgattcagagtgtccttcctcaccactctggctggtgaattgccccctgccccgtctgatcatgtaggttctccctctgaccatgaacacccccagcgtatcactgcaattacttccttgtttccgacctccttcaggtggagttctgccagagccataaaggagacatctctgtccgccttgcccacagggcctagcaagagcagagagcagacagcagacagcagtaacaaccgttcccaacttactgagcgttccaggtgtcagaccttgagtgctaagtgtcttagatacatttttctcatttaactctcccacaaggcttgtgagagatgtatggctatgctcattctttggtctgaggaaactgaagtgcagagaatggtcacatcgcccacaggcacagagttgagatagaaagagagacagagagaaagagagagggagggattcagatgtggccaggcacagtggctcacacctgtaataccagcactttgggaggctgaagcaggcagattgcttgagattaggagttcgagaccagcctgggcaatgtgacgaaagtccatctctacaaaaaatacaaaaattagccagccatggtccccgctacccaggaggctgaagcaggaggatagcttgagcctgggaagtggaggttgcaatgagtcgagatcataccactgcactccagcctgagcaacagagtaagaccctgtcttttttttttttttgagacggagtcccgctctgtaccccaggctggagtgcagtggcaccatctcggctcactgcaagctctgcctcctgggttcacgccattctcctgcctcagcctcctgagtggctgggactacaggtgcccgccaccacgcccggccaattagtttttgtatttttagtaaagacagggtttcaccgtgttagccaggatgacctcgatctcctgacttcgtgatccacccgcctcgggctctgaaagtgctgggattacaggcgtgagccaccgcgcctggccatgagaccccatcttaaaagaaatagagtcagatgtatctcactccaaaggctcttgccttcaaccattctgtcactcaaggttcaatagatgtttgttgaatgactgaatgagctccctttgttgggacagttacaggacctgttgatcttaccttcagaaggtctttgagagtccagactctggtgtagcccccaagctaaccttcctgaagtttcaattactgaggcatctgtcttgaaatctgggatgatgcccaattgctttctacatacaacctttatactagtaataataagtaacatttatatattacttcatggtttataaggactttttcttagcgagtgccaaccatatgctccaagcctggtattagagataataagcttaaaaagactgaggctggctgggtgcagtggctcacacatgtaatcccagcactttgggaggccgaggtgggtggatcacttgaggtcggtagttcgagaccaacctggccaacatggtgaaaccttgtctctactaaaaatacaaaaattagccaagcgtggtggcacattcctgtagcccctgctactcaggaggttgaggtgggagaatcgcttgaacctgggagtcagaggctgcagtgagctgagatcgtaccactgcacttcagactgggcaacagaccgagactccctctcaaaaaaaaaaaaaagactgaggccaggtgtggtggctcatgcctgtaatcccagcactttgggaggccaaggcgggtggatcacttgagcccaggagtttgagaccagcctgaacaacatggcgaaacctcatctcgataaaaaatacaaaaaattagctgggcatggtggcatgcgcctgtagtcccagctacttgtggggctgagacaggaggattgctcgagcctaggaggtggaggttgaagtgagctgagatggtaccactaaactccagcctggccaacagagcaagagaccctgtctcaaaaaaaaaaaaaaaaaaaaggccgagcgcagtggctcacgcctgtaatcccagcattttgggaggctgaggtgggcggatcatgaagtcaggagattgagaccattctggctaacatggtgaaaccccgtctctactaaaaaatacaaaaaaattagcgaggcgtggtggagggcgcctgtagtcccagctactcgctgaggcaggagaatggcatgaacccgggaggcggagcttgcagtgagccaagattgcgccactgcactccatcctgggcgacagaacaagattctgtctcaaaaaaaaaaaaaaaaaaaagcgcaaaaaaaaaaaacaaaaaaagactattggccgggcgtggtggctcacacctggaatcccagaactttgggagaccaaggcgggcagatcacaaggtcaggagttcgtgaccagcctagccagcatggtgaaaccccgtctctactaaaaatacaaaacattagctgggcctggtggcacgcacctctagtcccagctactcaggaggctgaggcaggagaattgcttgaacctggcaggcagaagttgcagtgagctgagatcgtgccattgcactccagcctgggcaacatagcaagactctgtctcaaaaaaaaaaaaaaagaaaaagaaaaagaaagaaagacagggttgagcacaacagccagggctcaagacaacgtggggctgctggggaccagagacacagaggctccaggaaggaccccattccccacccaccccaacaattcttcagtcggcagagaccttcttgttctgctatctagccctcactgcagaccagtgagacaggggctacagctacaggctggagtgcagtggcatgatctcagctcactgcaacctttgcttcaggctgtgtctctggtccccagcagccccacattgtcttgagccctggctgttgtgctcaaccctgtctttctttctttctttttctttttctttttttttttttttttgagacagagtctcgctatgttgcccaggctggagtgcaacggcgtgatcttggctcactgcaacctccgcctcacgggttcaagcaattctcctgcctcagcctctcaagtagctggcattacaggcatgtgccaccacacccagctaattttttgtatttttagtagagacggggtttcaccatgctggccaggctggtctcgaactcctgacctcatgatccgcccacctcggcttctcaaagtgctgtgattacaggcgtgagcctggccaaccctgtctttcttttgaggcagaaggagattctggtgcatgtcctgcagtacattcagtacctccagagaaacatcgatgccgccaaggccttgttcaaatgccacatcaccactggggaaggtggacttgcgggtaagtagttcagccagtgtttcctggtgcctgtgatgttccaagtgttgttccagccatcagggatactgagtgacccttctgtcaaggcctggtataggggacaaagagagatatgcaagatgcctcagagaagaggggccttggagctgggccttcaggactgtaggagatgcagggaagcccagccaggcagaagaaacaggccgggcacagtggctgatgcctgtactcccggcactttgggaggccgaggcgggcggatcgcttgaggtcaggagttcgagaccagcctggccaacatggcaaaaccccgtctctactaaaaatacaaaaattagctggtgtggtggctggcgcctgtaatcccagctacttgggaggttgaggcaggagaatcacttgaacctgggaggcggaggttgctgtgagccgagatcacgccactgcaccctagcctgggcaacagagcaagactgtgtctcaaataataataataataataataataataataataataatatatacataaaataaaataaatctgatcatgaccttcccctggcataaaatccctcagtaattttcatcttcttcacttccctccatagccaggtgctggaaaccatttgggatctcatccctgccttcctagtccctgccaaacctccccagcctcatctcctaccattctgccagcgtattttatttatttatttgtgctttttgttttgttttgttttttgttttttgtgtgttttttgagacggagtatcactctgtcacccaggctggagtgcagtggcgtgatctctgctcactgcgacctctgcctcccgggcctctgccagtatattttacactacagtaacagcgacagcacccagcacatctagccttaggggactgctatgttccaggtgctgtggtatgtttctttctttctttttttttttttgaggcagagtttagctcttgttgcgcaggctggagtgcagtggcgtgatcttggctcaccgcaacctctgccttccaagttcaagtgattctcctgcctcagcctcccgagtaggtaggattacaggcactcaccaccacacccagctaatttttttgtatttttagtagagacggtgtttcaccatattggccaggctggtctcaaactcctgacctcaggtgatccacccaccttggcctcccaaagtgctgggattacagctgtgagcccctgctcctagccgtttttttttttttttttttttgagacaaggtctcactctgtcacccaggctggaatgcagtggcatgatcatggctcactgtaacctcaaaatcccaggactcaaaactccaggggtcaagcaatcctcctgccgcagacttctaagcagcttgtactacaggcacgtgccaccaatatccagataattttcttttttttgagatggagtttctctctgtcgcccagactagagtgcagtggcgtgatctcagctcactgcaagctctgcctcccaggttcaagccattctcctgcctcagcctcccaagtagctgggactacaggcgcccgccaccacacccagctaatttttatatttttagtagagacaggattttgccgtggtcgccaagctggtatcacctcaagtgatccacccatctcagcctcctaaagtgctgggatgacagatgtgagccatcgtgcctggctctggctaatatttttgtttgtttttttgtagagacagagtctcactgtgttgcccaagctggtcttaaacccctgggcttaagcaattctcccgccttggcctcccaaagtgctgggattataggagtgggccaccaagcctgacttgtttctatgtattaactcacatttaatcgtcaggacaaataccgaagggaaaagctaatgtggtcctgttttgcaggtgatggaactgaagcccagagaggttaaggtcacagagatgagcctgagtcagggcctggctcagagcccacacacatcatctccatgccacgcagacctccaatcacacccaatgacttgcctgtccccagacaccccgcgcgtgtcttctcatgcctgcaagctcttactcagatagtttcttcttctttttttttttttttttttctgaggcggagtctcgctcttttcgcccaggctggagtgaagtggcgaaatttcggatcactgcaagctccaccccctgggttcaagcgattctcctgcctcagcctcccaagtaactgggattacaggcacccgccaccacacccagctaatttttgtccctgacatgtagtgttgaggactggtcatgaagtgagagactggagtcagggagatgaggaaagacactgttcggagtgatctagacgggacaattaggcccaagctagcgctgtagatgagaatgtggatagaagtgagtaaacctagaagatgttaatgaggaagaatcgagaggccagagggaaaggccccagtgaccttgagggggtcggctaggagaccctcactgtgttgaggaaggcgggaggaggtactggtgtgggcggggagagggtgaagcatcctcaaggtgcccagtctggggaagtgttgattccattctcccactgagccaaggcccaaaacagccctgaagaaacctgagttcttgccctctactttcacagtcctgactgagcggccttggataagccctcagtttccacactgtaaagtcagcctgggggcccaccctgacccgggactgaggagcattgtctggaaggcaggaactgcagttggatgcagatggggtgggggatctgagctgtttccctctccatccctgcagggctgggtcagaaaccagcctggggcccagccaggcggaggagacactctaccccctccagctccccaagctctcagaagtcctgtctccagggggcgtgccagaagcctcggaagaagaagctgacccaggcatcaggtacaagctgtcactggaggcagaactagaagcccaggtcacccaggagcagggctccttctccagggatgtccttactctgggggccttctcagcaccctgtgccggggttcaactcccagctcctccttgtattagcactgaggcctcacacccggaaacttggggttcactggtctatggcagaacctgggcatcagtattttttttttgagagagactctcactctgtccaccaggctggagtacagtgacacagctcactgccacctctgcctcccaggttgaaacgattctcctgcctcagcctcatgagtagctgggattacaggcatgtgccaccatgctcagctaatttttgtatttttagtagagacagggtttcgccatgttggccaggctggtcttgaactcctgacctcaagtaatctgcctgcctcggcctcccaaagcgctgggattacaagcatgagccactgcgcctggccagtgttttttaaaggtcgcaagatgattctgacaggtggacaggggttgaacaaagaggcctgtgattgaggatctgggcattcccataccaggccaggcatagctttgacactgacaaggatgtttcccacctgaaccctattctggtgacaggcaggtgactcccaggcccctctgacacctgaacctctgctcccccagaaagccagactcggaccccgaagcctcgccgctctctggccctgaacaagcctgagaagctggtggccccatccccagaccagaaaggaagtggcacaggggggaccactacccctccaaggtgccctgactcctgcggtcacccgaggcctgcatcatcctcacctccaggtgacagaaaaggaggacagtcccagctgacgctgttggatctggccgaggacaccatccactgtgacatctcaagtgggtctctttcctcactctgaacttagtctttcagtaagatgccactctgggggcacctgctgtgtcccagacacagtacccgtagtgggggctgcagcagtgaataggaaacaccgcctcttacttctcaagcttgtggccttgctctggtggtcttcatctcaggctgtgtcgtggctgtaatggggggatgagatcagcgtcattgtcttgtgtgggcttcccatcacagaaccagggaggagggcagggcctccgcctcaggcctcacttggctctcccatgccccagtcactgcactggtttggaaaacgtgtggtgatgctttcaagcagagagctaggccagagggagggaggtcggagctcgaggctttgaggcctcaagtcatctcgttcctctatttgttcattcagccttttctttttttttttttttttgagatggagtcttgctctgtcgcccaggctggagtgcagtggtacaatctcggctcactgcaacctctgcctcctggattcaagcgactctcctgcctcagtctcacgagtagctgggattacaggcgcgcaccaccacgcccagctaatttttgtatttttagtacaaacagggttttgccatattgaccaggctggtcttgaactcctgatctcaggtgatcgcccaccttggcctcccaaagtgctgggattacaggtgtgaggcactgtgccgggcccattagagttttttgtttgttttgagacaaagtcttgctctgtcgcccatgctggagtgcagtggtgcactctcggctactgcaacctctacctcccaggttcaaacaattctctgcctcagcctcctgagtagctgggacaggcgcccgcacccatgcccggctaatttttgtatttttagtagagacggggtttcaccgtgttggccaggctggtcttgaactcctgacctcgtgatccaccgcctcagcctcccaaagtgcaggggttacaggtatgagccacggtgcccagcccccattacagcttctgatagggatgtgggattcaaaaaacccaggggtgatttggggcacccctcagcctcacaccaacgtgacaccctgcatcctgaggtttgggctaggattggggagtgagagggtgtgtggcagaagctggcacccctttgtcccctgcttctgggcttcctggaatttggtccagtccccaggcatggtcatcctgatctgccccttaggctgctggtgccagggcagtgtccaggatgacgcacctttccctgcgctcctggctcaggaagatgtggcgaggatccattttctcaacaagacccagccccatcccaggtaagggcgtccccagggcactgagtgagtggtgctgaggggtttggtctggcgtgggtgaggggtagtgggaagacaggccaagtcacgtcctctgcgggtgccccttgagcaccaatggaggcccagctttgtgtctgccattgtgagctcgcaggaaagcctgacttcccatttcccagacatggtcacagcttcctcaccagtctctttgcctcacctgttgcccctccatcccatcctcatgtgaccacatggcttttccaacacagagacgttgaccacggagtttgtggcttaaagcccttcctcaggcctgcagcatagagtccaatatttttgtttgtttgtttgtttgagacagggtctcactctgtcgcccaggccagagagcagtggcacaatcataggtcactgccgcctcaaccttcagggctcaagcagtcctcctgcctcagcttcctgagtagctgggaccacaggtgcacaccaccacacccagctaatttttttatgtttattttttgtagaaatgaggtccccctatgttgcctaggctggtcttgaactcgtaggctcaagcaatcctcccacctcagcctcccagagtgctgggattataggtatgggccactgcacccggcccggatatttcacctggcctttgagaccttcagtggcccccaactcacctcgtcagccctctctcctgcccttcacccatgactcttatacttcacactgccacacatttgccattccccagaagccctgcgccagcccctctgagcttctcacattccagtacttcttcctggatagcctgcttccctgtgcccctggaaaactgcccatccctcaggctgagcccactgctctccactggctcatcatcctccagcgccctcggtcacagcactgcttacgggctgggctatcctcatgagactgtaagctccctgaggatgggagcctcgactgactgagctttacacccccagcactcccccaggggccagtgcagagtgccaaaggggccccatagcagtttctagcccagagtctgtgagtctgactctgaaactccacctcttgcaggcagaagctggtgttctatgattccagcgaggatgtggacaaagggtccctagacgctgacccttggctccctgcctggaccccagagaacagcccccaaggtgactgcaactctgtctctcctccttgtaggctggtgtgggccttcccatactttcagtctgaggatgtctatggaagagaggaggcgggaaagggaatggagatcccctaagcacagggaaggcaaacacacagtgcacctgccagctctccgccaccgctgccacggaggcttgacaatcaatcaccactctttccttgagcccagacatggcctcagaatcattctgggtctttttggtttgtttgttttcttttttgagatagggtttcactctgtcgtccaagctggagtacagtggcgcagtctcagctcacttcaacctctgtctgctgggttcaagtgattctcctgcctcagcctcccgagtagctgggattacaggtgcccaccaccatgcccagctaatttctgtatttttagtagagatggggtttcaccatgttggccaggctggtctcaaactcctgacctacggtgatctgcccgcctcagcctcccaaagtgttgggattacaggcatgaaccacccctccgaactctttttgtgtttttgttttgttttttcttttgagacaagttctcgccctgaggctggagtgcagtggcgcaatcacagctcactgaggcctccaattcctggactcaagggatcgtcctgcctcagcttctcaaagtgctgggattacaggcacgtgcccctgctcccgacctcagaatccattttttttttttgagacggagtttcactcttgtctcccaggctagagtgcagtggcactatctcagttcactgcaacttctgcctcccaggatcaggtgattctgtgtcagcctctgagtagctgggattacaggtgtgcaccaccacgcctagcaaatttttatatttttagtagagacagggtttcaccgtgttggccaggctggtctcgaactcctgacctcaggtgatccacctgcctcggcctcccaaagcgctgggattataggcgtgagcccccgcatctgacctcagaatctttcttgttgcagagctgcaggtagttataatcagcctatgggactttgcacattatgatattgatttttctttttttttggccatccctgacataatgccaaacatcattttgcttcatttcttcttcttttttttttaaattttgagacagggtctcactctgtcacccaggctggagtgcagtggcacgatctcggctcactgcaacctctgctcctgggttcaagcgattctccttcctcagcctcctgagtaactgagattacaggcacgtgccactacccccagctaagttttgtattttttagtagagacggggtttcaccatgttagccaggctggtcttgaactcctgatctcaaatgatccgcccaccttggcctcccaaagtgctgggttacaggcgtgagccatcgcagccggctgcctcttcatttctgtgatcaagaattcaaaatgagaaactgagattcgctttccgtagcatcaggcactatctcctcaatgccagctgctgtgctagggcagagggtgatctctggccacacccctgagtctgctgttccctttccagggagcccactgttcctggggcctccccagattgatgtctggagtggaacaggccacccaagtgagatcctcgggctcagccctagccttttcagctccccagggaaactgctgccagacgagatcttggaggatgacatggagtacctgacccaaggtgaggcccaggcctggccctgatgcttagttcattcgggaaacatacggtgcccaggcctgcgctgggccatcctgggtgcccggggtgaatcctgccctggccctgcctcaaggagcccacggcctagtgggggagcagccacaggctggtgtggtgcatgggtggctttagaagcccatagcaggacttgagctcactctgtgtgttggaggtgacccaggggagtgggctgtgagcgggatttggacctagggtgggagatcctgaaggagaacgccagagacggggactccggctagcagggacggtgtggctgaagctgggcggtgtgggagaagcatttccactctggctgcccctctggtctccctccctagcggctttctttgaagaagtgtgcttagatctggagtcttcaccttcagcctacacgcaggaggctccacaggaaaaggtagacatcctctgcccctctgtccacagacacatccatccgtctttccacacacgtcactcatggcttcattcactcatccactccctcaccctttcagccaccatctacccatctgtccttccactcatgcgtctcctcatccttaaaaccgccccccgaccctctctgcgctcactggtggccaccagatgccggctctgtgctgggcacgtggaacgaattggacaaaatggataaaaaaggataaaagctgccaggtgcccatagaaaagaaaactcacatcattttattcatttattttattttattttattttattttatttagactgagtttccctgttgtcgcccaggctggggtgcagtggtgcgatctcggctcactgtaacctccgcctcccgggttcaaacaattctcctgcctcagcccccctagtagctgggattacaggtgcctgtcaccacacccggctaattgtgtatttttagtagagatgggggttcaccatgttggccaggctggtctccaactcctgacctcgagtgatccgcccaccttggcctcctagagtgctgggattacaggtgtgagccaccgtgcccagcttcccacatcattttacaactactctacgaagcagggtctcctgtggccccattttacagataaggaaattgaaatcaaaagactaagctgggcgcggtggctcacacctgtaatctcagcagtttgagaggctgacgtaggcggatcacctgagatcaggagttcaagaccagcctggccaacatggggaaaccccatttctactaaaaatacaagaagtgtccgggcgtggtggctcacgcctgtaatcccactattttgggaggccgaggagggcagatcacctgaggtcaggagttggagaccaaccagtctggccatcatggcgaaatactatctctactaaaaatacaaaattagccgggtgtggtggtacgtgcctgtaatcccagctactcaggaggctgaggcagaagaatcgcttaaacctgggaggcgggggttgcagtaagccaagatggcaccgttggactgcagcctgggcaacaagagcgaaacccagtctcaaaaaaggaaaagaaaaagaaaaagaaattatcagggtgtggccgggcgtggtggctcatgcctatacttctagcactttgggaggctgaggcgggcagatcacctgaggtcaggagtttaaacctagcttgaccaatatgatgaaaccccctctctactaaaaatacaaaattagctgggcgtggtggtgggcacttgtaaccccagttactcaggagtctgaggcaggagaatcacttgaacccaagaggtggagaatggagctgagatggtgccattgcactccagcctgagggacaagagtaagactccgtctcaaaaaaaaaaaaaagaaagaaaagaaaaaaaagaaaagaaaggaagaaagaaagaaagacagggtcttgctttgttgcccaggctggagtgcagtgtcaccatcatagatcagtgccttgaactcctgggctcaaatgaccctcccacaccaccatgcccagctggttttttaaattatttttaaatttaacttaattcaatttctttttttttttttgagacagagtctcactctgtcacccaggctggagtgcagtggtacgatctcggctcactgcaacctccgcctcctggatttaagcgattcttgtgcctcagcctccagagtagctgggactacaggcgcccaccaacatacctggctaattttttagtatttttagacagagtttcgccatgttggccaggctggttttgaactcctgacctcaggtgatcctcctgcctcagcctccgaaagtgctgagattacaggcatgagccactgcgcctggcctattttttttttttttttttttttttttttgtagaacaaggtctctctatgttgcccaggctggtctgtaactcctggcctcaagcagtcctcctgcctcagcctcccagagtgttggggttacaggcgtaagccaccacaccctgccaatctgagctgctgctaatgctcatgttatgtcctagaaaagcagtactggggggatgaaggggcaccacttgtctcccctcccatctttctccctcatcatgccccaggacacagcctccaaggcccccaaagaccctcctgagtcccacagcctgcaccggtcctcagtctcgctggaccactgctacctctcgctgagcgggaacagcaaggcgccatccagctccagctccagctccagctccagctccagctcggaggacagcgactcggagcccctgtggaagcagcgagaggtgagagacacggccgcatgccagggccagcagggcctccttcctctctcaccaccctctccctcccccaggatatgcaggccaaccctgtgggcacgccgggctccagcgaagaggacgaagacaccacatggacccccacccggctggcctcacccctgctggcagctgagaaaaaggccacgaagggccaagtagccagggcccctgtgaagcccaaggagaagaagaaaggcccctgcccaccccagatgaagaagaagtgtgtcaacggcttcatcatgttctgcaggatgaaccggaagcagtacatccggtgggtagggggtcgtctttggccctggggaaggccctggcttcgttctctgcccgcagcctggccatgccgctcctcacaactgtctgacactttttccccctccgagaccccacaaacccttcgtggaccacagttcttccccagaactgaacccggccccattgtattggacagggtccatccattgtcagcgctgaaacccaattcaggctttagacttcagaaaaaaaggagttttttttgttttgttttgttttttgagacagagtctcactctattgcccaggctgtagtgcagtggcacaatcacagctcactgcaatgtctgcctcccgggctcaaatcactgcaacctctgcctctcagattctcctgcctcagcctcctgagtagctgggataacaggcgcgccatcagctaatttttgtatttttagtagagacagggtttcaccatgttggccaggctggtctcgaatgcctcacctcaagtgatctgcctgcctcggcctctcaaattgctgggattacaggtgtgagccatcaggcccagcaagaaaagaaaatgaattggcttatataacctagaaaacaagggcgggtatagactgccttgagacatagctggttttagggctcacacaggctgtctggaatctttgtccttttcacccagttcctctgtcttccgggctggcttcattctctggcaggtggggtcaccccaggaggcacaggctcgggtcctgtcccccacccaagcgaccccgggaggaggagaggtctctaaggttttaagcaaagtccttgggactgactttggtagatccggtgccaaccctgaaccagtcactgccaggcctggagccaggggatggggaggccccccccaagccacagtggaaaacagctagttcctttacaggaagatccagatgtgggggccaggagcggtgcccacaggtcccctgcactctcctgggacaccaggtgcccccttgtgaacagccgctgagtccagctccctctgcctcctcagctccagagggtggtcttggaggccttgtagacccacaaggctaggaagggtctgagttctcagtcagggtgtcctgcagacctctccttacctcctcctccttcctgtcccagatcctgccctggaaccgcttccacagctgccaccaaggagctggcccagctgtggcgggtgatgacccagcaggagcggaggccatactggtgagaggctccggccccgaggtgtgggtggggggtggaagagcctccctaccccggaaccctgctctgtctctggagccttgggtgtcatggcatgggagactgggccgaggaatttgcgtgttgccccttcttatgaaacccttgggggtgacacaggtgtaggggtaccccaccacagctaagctggggaacagctgagcccagacatggacccctgcctcaattcttttgctgtctctgccacacgactttctcggggcgtggtctgattttcctgtcgcttggccacctcgactcccccgaatcctgtcccctccaccttcaaggagctgccacctgccctggctcctgactttgaacacatcccagagcccttggccgagtcccatcttactgactgggacttggtggacccaaggctcgcccaatagaggctaaaacggtggcccaggcccctgcggggacacaggattgggagtggtacagggatgcccgggaggcgagtgaggaagccaggccatcctgccaccgtctccccagcaccaaggctcgcaggttcagccgccagcacaaccgcatcgtgaagcaggacggctccagcagcgaggctgaggactgggagacgccaaagcccttctaccagctgctggccgagaaggccttgccgctgcccccgcacctccagtgagagggcggcccctcgcctcgctcccctcacccctcatggcaaccgcggctcttgctggaagccaggacccatcgatgaacttgtccctcctgggcctccagcccctgagaatgcaggtcccatgggactggggaggggggcactgattagccccaaccgctgggcacatttgcctggagcaccagagtcacccacagctgccttgattctcccccaggcttaggaaggaaacccaaaatgaaatgcggggtgtcggaaggtgaagtttacccacccctctccccttcccttccccaccccagagccactcggttgcaaccctgttcatgctcacctcaccctactcctccctctcctgttctatttttagactatttattgttttaaataaaataaagcaagtggaacctttgttaccagcaagagagacaagggcaggccctcctgcgtccccctgctgccccactggggtgctccgtccaccctcatctggaggcctgtggcttgcaagaggcctcagtgccaccccctccccagccactctgtgcatctgaatgcaaacccctcttcccctcgggaggcagcaatgggaaggccaggtctcgaggtgggctctgtgttcagcgctgctttggacagacactggaaggcaccccagacccctggtggtggtgtaatccgataactttattttaattgaaaatggaggcataacatgtcctagaaaaataaagatttaggatacaaaggagacacagcggcagggctgcccccagggatgagggaatctttggtctgggccggataatgaggacaagggcttgagtcgaggggagctggtgaaggaagacccccgtctccccacagctgccccaccccccgcccctggcaggaaatgccacactggggagggtctccagtctcaggggcgcggggctgcctgtcctccaccttcggattccaggcagttgtgacaacaccagctatcggcagagctattaatagtgtttcagggagtgacagggagagggctctgggggctggaagtccggccctggggcagggtgttccgcttacagctagtaccaagtggagggggcagggcccctgagtcaggaccctgagtcccccacgtatatggcagggcacagcatggggagggctgtaacagagaggcctcccatccaaagggggatggagacctggacaggaggtggccggggatacaacccccagcaccaccagggcttggagaggccacccaggcagaaggatgtggtgactggggtcttcagcaaccgcatttctggggctcccccctcccattcctgtccctgcgtcttcagcaccaatgtcgggagaggccacggggccacactgggtcacagttccaagggctcctccacaggcaccgactggagctgggtcagaaccttggcctcagcttccaacccctcgtcaacctcaccccctgcggtggcccccaggagcagcccctcagggtcggggtctggcagcctcagcacggtgtggggggcctgtgtccccagccccttttccgcttccagcagcccctctgttcctgcgcttagttccagccctgctgaccagacaggcacggccgcgggtgacaacatcagcccctctggtgggggcgccgggaagttgggcaggaggccaggggagtcaggggagaagggcaggctggtgctggaggtggtggcagcggcggggggtggctgctgtgcagaaagggtgcctagggcgtgagcctctgggagagcagggctgggggccaccgggaggcctccctcaggcacggagatggccgtctctggcttcagtggcagggccaggccgggggctggcggcaggacctgggagacgagcatgctggtggggaaggtggcggtgaggatgatcttgccctgctgcagggccacacccgtcacgatggggctgccagacacagggttggccaggaggaagtttcctgtggggagagagggaccgagcgcaggtgagagccaggagagcaggccaagccagagagaagtggagactgtgcagctggagggcgggcggagggagccttgtggtgggccttggggcactgggacttgccagggatgagatgccctccaggagcccagggacagcccctccctctccgagatgactgcacccctccccggctctcacctaggcctgagggagggagatgggggtacctggggcagtggccgaaggcagctgcagggcagtcacgcccaccccggagttgatgaggtgcacattggcagggcctgctgcagctgccaccttcacagggctgcctggcccggctgccaacagctgcaggggccccacagcctggggcagggtcaccacctgtgaggtgggtactacctggggcaggttcaatagtggggaggtggggctcaggcccgtgggataccccgggggtggggagagcggtaccacttgtggggcagccacagcaggcactggccccgggggcagaggaaaggtggcagccgtcggggggccaggcaccacttgggccaggggccccaggacctcctctccaagggctggtcccggagcagccacctgggcccctttggtctcaggggcctccgactgagcctcctccagccgcacctcccctgtctgagggtccaggaccagagaggtcttggtctcgctggccccctgagggctgggctgcggtggaggggcacccccgcccccagtgagcagcagcgggcccaggctggaggcctcgcccagggccaggccgttgatgatgacggggcccccgttgaggagcactgctggggagccgctggctgccaggaagctcccgttcaccaggatggaggaggaagccgggcaaggcgcgggagggccggtccctgccaggaatatggagccctgggcagcggcctcggcggacactggggccgcccctctctccaggtcctcaggacttcggctggactcgtcctcagtcgtgggattcccatcagactcgctggccggagaaatggctgtcagctggggtcccttagcctgtggggcctcccgcatagccagccagctgctcccccacctttccctggcccaagtttcggtggatcattccaggggttatgacgcctctctgagaccactccaaactccagggccttttgcaagccctgcgtggacaccactgcagagaagcgctggggagggaagaggcccttgctctcccccacctcggcctcgggtccccagaggctgagctcccaggttgccctaaaagttccttggttgggcggaaagcgggcgagtggcctggagagagggagcagcagccgccagcccagttcccggtgccctccccgcggggcgtcagagaagggagaggccggcgctcagggtgggaggagaagggtttgggttacagggaaaccggagctgggaaaggttcacgtttcacaacaaaggcagaagacggaccacgccgtccgggcccggagggagtgtgggggcgggtgggtaagagtaacggtcagtgaagaaagggggctgggaggcagcccctacgcggagtggagtggccacaggccctgtcctttttcctcagtccctctagtgccccccgcagtgtgattccccaacaccgatgggatttgggaaggagctcggaatggagccgctggaagaggagacgcgtgcggggagagggcccgggcgggtgcctgtcccgtccacacttagtccccgcgccccgcgggcgcctgagattgtgagctggtcccgggagatgtccgaggacctcggcgcgccggccccagcagtgggcacgggggaagagggctggtggacgggatgtccccgggagagctggacttgcgccgcccgaggcccctcacctcttgcagggcgcgccgcctccggccccggtccggtcgcgctgtcgccggttcttgaaccagttgctgacctgcgtgagcgacaggccggtgagtgtggccaggcggcgcttctcgtccggcgtggggtagcggttgccgcggtagcaggccttgagcgctgcgcgggagcgctccttgaagcagtagactgtctcctcgccgtcccagatggtcttgggcagcgggaacttcttgcgcagtcgatacttgtccactgcgccaagcgcgcggccgcgggcccgctcggcctcatggtagcgcgcgcgcaggtagaggtcctgcaggaaggcgtggtgggcggcggggaaggggcggctctcgagtagccggtagagctcggcgtactcgccccgctggaaggccaccagggcccgcgcgcgcaacaccgggtcgctgccacgtaggcgctcggccgggggcagtgcgcccaggaagcggctcaagcggccggcgtggcccgcctggagcagcgcctcgcagacgcacgccacctgctcgggcgagaagcggaggcccgtgggcggttcggaagcggcctcggggggcgacccggggacgcccggggatcccgggccctcagctcccgcagccgctgcgcccgccccggccccggccgccgccgccgcctcaccctcggccgcctgcaaagtctgcaagagctggcgcgcttcctcctcctcctcttcggtcgccgccgccgccgccaccgcctcccccccagccgccggccccgcgctcggctccgcaggcaaggtagccatgttttgcaactttgggaagttcctccctccctctcttcctccctcgggctttccccagcctcctcccccacctgtccccccttttcgcccccactccccgctcttctcgatcttctttctggccgaccctgcgccccacgccgggaaggcgagatccagctctccactcgggtctctgtccccttgtgtgtgtccgtccccctcccgtctgtctgtgattctccctttgttttccctccgcctctggccgcgctttctgcctccccccagcgtgtgcttctggctcagggcctcagtttccccatcgggacaacgcagaaggtaacgggccgtccaggaggactaagggcgcgaagcctccgccccgagactgagcttctgcacgcctccgtctccagggtcctctgcaggcccccacattccccatctcggcctgcgctccgcccctcggaattcccggctccgcagggggggcgggtctggccgggaggaggggcggggaacgggctagaaagtttgcagcaacttttctcgagcttgcgtcccaggagcggatgcgcgtggcgtgcgcaggcgcagtggaaggaggatggccgcgcgcgctgccagcccagccccctcttctcgacgctcggtggcacagctgggccacagctgggcgggggcggtgcctccgggtggcccgctcgccctcctattggccggacgccaaagccccgccccgtggcttttcctcccccaaccctgattcggccgcttcgcatcccgctagctcctcccagaccttcggccgcctccacacgcctccggattggcccgctgcggagcctccggcccacaacgcaaaccgcggacactgtggagtccagagctttgggcagatggagggccttttattcgcgagggtcgggggtgggggtcctaggtggggacagacaataaataccgaggaatgtcggggtctcagtgcatccaaaacgtggattggggttgttgggggtcctgtagcctgtcagcgagtcggaggacgaggtcaataaatatccaaaccgccgaagcgggcggagccggctggggctccgagagcagcgcaagtgaggaggggggcgcgggatccccgaaaaagcgggtttggcaaaagcaaatttcccgagtaagcaggcagagatcgcgccagacgctccccagagcagggcgtcatgcacaagaaagctttgcactttgcgaaccaacgataggtgggggtgcgtggaggatggaacacggacggcccggcttgctgccttcccaggcctgcagtttgcccatccacgtcagggcctcagcctggccgaaagaaagaaatggtctgtgatccccccagcagcagcagcagcagcagcagcagcagcagcagcagcagcagcagcagcagcagcagcattcccggctacaaggacccttcgagccccgttcgccggccgcggacccggcccctccctccccggccgctagggggcgggcccggatcacaggactggagctgggcggagacccacgctcggagcggttgtgaactggcaggcggtgggcgcggcttctgtgccgtgccccgggcactcagtcttccaacggggccccggagtcgaagacagttctagggttcagggagcgcgggcggctcctgggcggcgccagactgcggtgagttggccggcgtgggccaccaacccaatgcagcccagggcggcggcacgagacagaacaacggcgaacaggagcagggaaagcgcctccgataggccaggcctagggacctgcggggagagggcgaggtcaacacccggcatgggcctctgattggctcctgggactcgccccgcctacgcccataggtgggcccgcactcttccctgcgccccgcccccgccccaacagcctacagctgttgttagtccactcgcacgcctcgaatcccgtccgaactcgtcattggctgcttcctagcggcctgtgttgattggctgcccgaagatccgccctcctgccgtgggcccagccccgcaaatgcgcagctaagcgggtggcaaggggcgggtggagcgcggggcgcgacggcggaggggggcgtgggcagccggacgtaccctggcagggagcagcaggtggcggcggtgcatggggcctggccccaccagcgggcactggcccacagccacggccggggggccatctagctggagagagaagggacaggtgacccgatcggagcccagcccagccctcagcggtggggcgagagacagcgaggggaatcgaggttggggaggttatctagggagatcccggagggaatctggtgaggcctgaacggagggagatctggggctgaataaagggcttctgccctctaaagtcgcaaagacgtagggtgagccctatatctggacggggagaccaggagccagggaggggatctgcagaatgggcagcaggtctgaggcaggggaaagagaggggtcttacatgggaaggtggatccgtggcccggggactggggacccccgtgacagctggaaggagaagaaagaggcatagggcgcgtggaggggcgaaggagggcggtggcgcggcgtgccccagcgtgggtcccttccctcctccaggtgtctatacacgccccgcggagcagacggcccacctcctcccggtcctccggggaaggggacacatgagggactcacctgtggctccctctgcctgcagcaactccatccgctcctgcaactgccggacgtgtgcctctaggtcccggttccgagcctctgcctcgcgtagttgactgtggggaggtaaggacggtgagtccgtccgggccggacgagaggggatgccaagggttgccaccggcccgcatcccggccccggccccggccccgatcccgacctggcgaagttctggttgtccgtgcggatggcctccatctcccggctcaggctctgccgggtgagcacctcctcctccagggcttcctggagctcccgcagcgtcacctcggcctcagcctctgccgcagggacagccgctggaactgccacttcagcctgtgtatggggaccaggcttaaggctgcctgtggctcctggaagactcaggacttgggcactggttccaggctaggaatccttgtttatcccctactcctccgtcccctcaacatttctggaatccccatagctcctgcaatgatccaagccccctcccttccctacctccctcagccccatccctgagtctggtcctctaaatctacacagggaccagagggctggtgctcaaacactaacacaacctatgtccctctgctgctcaaaatccctccagctccctaatgccctcacgacaaaaggccttgctgggttttgtttcctgctggcctctccagccttctcaggaatgattcagccaaactacctttcaggaacaaatcaggattcccacctgcccaaggcctttgccctggaggctctcgcctgaccacttggcacctttccttccatggcttgtttctccttcaccagcgctcagctcaaagatcgacttctcagatccccagcaacacacacacccttacttaatgccccactgtaactacagagaccgtcccatgtctgaagtaacctcgtctctccgtggtttctgtctgcttctgttcaggaagtccctagagggctctacagtgcacgccacccgggaagccctcaccttttctctcccaattgtccctgacggaccccctcccctccaccaacttactgtttcatcctgtggggacaccgagggctccaggctgggcgcttgcacgtgtggctcaagcagctgctcggcctccagttccatgggtgtggggcctgggacctcactgtccctggggagaggaggagggagtggggagggagacagaatgctgattctctggtggagaaccagaacttctggcctgtgggtaggggcagctgcttccaagacctcctgatttgaggaaggggagcagcagagcgaagagaacagagtcccaggtaggccaatagcccctcctctgcttaggaaaagccctgcccctctcctggccttgggcccctgggagctgctctttctaaaccttctgcagggacttggggtccagacccccatgttctagggtcagctcatctcctcccttgacatgtgaccgctgcagacccctcttctcagggcctcaggacagggaggccgacctgatggggagactgcttggctctggccacctccacagatgtggtcctaagactgggcatgggaccccaagatggcaacttgaggtcagcacaccccactcagctgtgggaaggggacagctcctccctggggtatgaagtggctgtcccctccaacccagcagtccctcctgtgggaacacggctcaggacctagctatcctggacatgcgcctgggttctaatagaggatgggttcaatcctgacccaccgttcaggccccgcagcggttcagaatcaagctggagttcattaatgataaggtatagtatgtgtaatgttgtccagtaataaaagctgactagaaaaccaactgttctcttagacaaagtagcatgaggaaggggaaaaaaacaaaccaaaaaaacacctgttctccactatttaaacatgtgtcagtacacgtgtgagccagggaccactgccatctggtgagctcacgagatatcaacttccttttccttatctgtattttctaatttacttgtgataagcaatgcattatttgtgtaattaatacttttgttgagaccaggtctcactttgttgcctaggctggaatctatcatggctcactgaagcctcaaactccaggctcaagtgattctcctacttcagactcctgagtagctaggactgcaggcacagaccaccatgcctggcacgattttttcaattttttgtagagacagggtctcattatgttgctcaggctggtcttgaactcctgggctgaagcaatccgtccacttcagcctcccaaagtgctgggattccaagcgtgagccaccatgcccagcctgtaaattagtacttttttttttttttttttgagatgaagtttcactcttgttgcccaggctggaatgcaatggcacgatctcagctcaccacaacctccccctcctgggttctgattctcctgcctcagcctcctgagtagctgggattacaggtatatgccaccacgcctggctaattttgttttttagtagagatgaggtttctccacgttggtcaggctggtctcgaactcctgacctcaggtgatccacccacctcatcctcccaaagcactggaattacaggcgtgagccaccacacccggcctaaataaatacttttttttttttttttttgagacggagtcttgctctgtcgcccaggctggagtgcagtggcatgatctcggctcactgcaagctccgcctcccgggttcatgccattctcctgcctcgcctcccaagtagctgggaccgcaagcgcccgccaccatgcccggctaatttttttgtatttttagtagagacggggtttcaccgtgttagccaggatggtctcgatctcctgacctcatgatccacctgccttggcctcccaaagtgctaggattacaggcgtgagccaccgcggcccgcctaaattaatacttttaaatggccttattgttatatggctgattcaaagaatttgcattcttttacaactgattgtaaaagtctaaacttcatattttccaagttctgaagtcctgtggctctgtgtactacagacgtaaaagttaatggttacaagattctgggaagcccagtctgtgactctgaggttttaaaattcaatctaacattttgaagtacatagatctgaaaatttaaggtcctccaactctggcctcttaggagtctttgggcccaaaacagtaaggttccaagactgatcctgcaactccattggctgccaaggagcaggacccaggaagctcaagcagcctcgtggcccctggaggccgtccagggcagtgcttacctgagggccatgcaggagtaggagtagcccacaaaaggcaggtggacccctagcggcgcaccttcccgaatgtccgacagtgtctcctgcgcaagacacacagatgtgagcagcagtcgtcagggcgggcccctcactgctttttgatcttggcttacatgttccccccaaaccagccccaactcagggcttatctaaagtggcccctccagcattttttcttttttctttttctttgatacggagtctcgctctgttacccaggctggagtgcagtggtgcaatctcagctcactgcaacctccgcctcccaggttcaggcgattctcctgcctcagcgtcctgagtagctgagattacaggcgccctctaccacgcctggctaattttttatatttttggtagagacggggtttcgccacgctggccaggctggtctccatcttctgacctcaagtgatccgcctacctcagctgttgtagtcccaaactctgggctcaagcagtcctccaacctcagcctcccaaagtgctgggattacaaatataagccactgtgcccagcccagttctgttttttttttttagatggagtcttgctgtctcccagcctagagtgcagtggcacaaccccagcccactgcaaactctgcctcccaggttcaatcaagcgattctcctgcctcagcctcctgagtagctggcattacaggcatacgccaccaagcctggctaaattttgtatttttagtagacacagggtttcaccatgttggccaggctggtcttgaactcctgacttccagtgatctgcctgcctcagcctcccaaagttctgggattacaggcgtgaaccaccttgcccaacccttttttttttttttttttttgagacagagtctcactctgtcacccagactggagtgtagtggcatgatcttggctcactgcaaactctgcctcccaggttcaagcaattctcctgcctcagcttccccagtaactggaattacaggcacccgagaccacacccagctaattttcttgtatttttagtagagacggggtttcaccgtgttggccagcctagtctcaaaactcctgatctcatgacccaccggccttggactcccaaagtgctgggattacaggcatgagccacagcgcccggccgcggtccagcctatttttttttttttttttttttttttctgagacagagtctcgctctgtcgcccaggctggagtgcagtggcacgatctcggctcactgcaaactctgcctcccgggttcacgccattctcctgcctcagcctcctgagtagctgggactacaggcgcccgccaccacgcctggctaattttttgtatttttaggagagatggggtttcaccgtgttagccaagatggtctcgatctcctgacctcgtgatccacccgcctcggcctcccaaagtgctgagattacaggcgtgagccaccacgcccggccagcccagcctattttttaatttcagtttatcttatttttgagacagagtctctctccgttgcccaggctggagtgcagtggcacaatcacagctcactgcagccttgacctcctgggctcaagcccacgtcggccaccctagtagctgagtatacaggcatgcgccaccacgcccaaccaatttttaaaacatttttgtagagacgggggtctcaccacattgcccaggctggtctcgaactcctgggctcaagcaatccacccacttcggcctgccaaattgctggggttacaggcgtgagccaccgtgcctggccccatcattttttcttgtatcctgttgcttcccttcagggcacctgccacactctccataattctctaattctctagactgcaactggatgagggcagggaccagagctcatctggtccgtgctggatccccagtattgttcagcaaaagggcacccagagccgagcaagcatgccatgacagcttgttacacggtgaagagagacggcctaagggaggaggagtcctctcctgcttctcatccctccaagtctcagctcagatagctccccactccagaaagccctccaggaccttccttgctgagtcaggagtcccccaccccctgcactccattgtctcagccctgatcactctggggccttactgtctgaagactgctctgtgttcccccactggactgtaagtctaggtcactgctgggtcctcagtagtagatgggcacagagcaggtgctctggggaatgagtgattcaggaccccagaaggtaggcactgtccttactccaactttatggagggagcatggggaggttcccgcagccgagcaggggccacaggtacctaccccgcccccgctcaccatggcagtgagcccgtcctccaccaagtcgaagttgcatgtgtcggtggcaccttcgaaatccggtgtaaaggggggcacgctgtcccggagaccatcccagtcgaggccaaagaagaagggatgtgtccggaagtcgcctgctccaccccggcccagccgtgtctccgggggacacagcaaccgctgaatgaagtctcgagcctcctcagggaccccttcgtccaccagcggcagagagaggtgctcctgctcagagggagaggaggcgatagcctgggagcgcctaccgggagaggccaggtctccctgcggccgtgctcaccttgtagtggacgatcttgccataggtctccgccgtggaatccgcgtagaagggcgtctgcccatagaacatttcataggcgaatacacccagcgcccaccagtcacactcgggcccgtagctgcctgtcccaggcccaccgcccacagcctgcaggatctcgggggacaggtagtctggggtgcccacagccaccagcgaccgcacctggaccaaaaggagcagagcgaggcttgggcccacccctctgggcccaccagctctgggccctccttccaaccactccccaaatgcttagcccctccctctgcctggtctaatactccgccacacagatgcacacttaagcctgggtcacaccacctcttttcccctccaaatccagtcccgctcccacactctgtgccttccatccctcatcagcagccccagttgctctgtggccagggcactggctcaccgttccatctgcccgcagcttgaggcaagagccgaagtcggccaggcggatgtggccacagcggtccagcaggatgttgtcgggtttgatgtccctgcacggaggaaaagagaagggtgggataaatgaacctcccttctgtggtcccaccaggctccgcccctccgggcagtgccacctgggaccccacttcctcgggttccgcccctgtagggcttctacagttctgacccctactcccaggcaccccccggtgggccccaaccaagaaggtccctctccaggccctggcctctctgggctctgaccttccaagaacccggccagggaacaagcttgctatcccctcggccatgctgcacccacctgtgcacgtagccaagccggtgcaccgagtctatggccatgacaatctccgccaggtagaagcgcgccatctcggccggaatccgctccccaaacttgctcagcagtgtcagcaggtccccgcccacgtaatactccatgaccaggtactgagaaggggttcgtcatgggtggttggtagtcccctgaggccctgatccatcacggatggctgggacaacccctcccagagacaccccatccttgggcagagacctgcagccccagcccagagataaccatagagatctgccgggccaaatcagagaccacctgcggcccccgcccccgcccctcaaaaaaaaacacaaacaaaaaaactttcctgggatgtcactgggcagattcactccccctgagatgttctgggaaagagaacccagaggccacccaacacccagagaataggtcccagacactccttccctaggcagtggccccgttagaattcctgaagacctatcccattccaggtaagagaccccccgcaacagagacatctttataagagtcccccagatcaccccagaaacgggcagtgaaggacaccatccccgtctcagatagggaaggcccctcatccacctgacacaccctcttaccgcacacagactttcccacagacgtttccgggcagcacccccaatcctagagcttcctctccccacctcctcgtccagtgacagcacgggctcttgtccctcttcctagtcaccccggcccggagctcaccaggtagttctcatcctggaaggcgaagtgcagctgcgtgatccaccgccggtccccattcaccaacacgtccctctcctcacggaagcacgacacctgcagggcacccggaggagctgcagccggagacggggcgcggatcctcaaagccccccacgtccgcccagcccctcacctcgcccctcttcagcatgtcccacttgttcatgatcttcatggcatacacctggcccgtctgcttcatcttcactaccgctacctgaggtcgagatagtgagacagagtggagacggcgggaaaacaaaagggctcgcccagacccaactccacccgcttctgcacccagccgtggccccgccccacctgccacaccacgcccattggtcccaagccccgcctccagcccagccctaggttctaaggctcggtcattcatcaatttctaaggccccgccccaacccctatgccccgcccaccacgagtcaagtcaggctcccgcccggttcggcttacctcgctgaacgccccgcgtccgatcaccttcagaatctcgaagtcgtccctctgcagtcggacctccttaagcctcaccacgatgggctccgctgggggggtggtgggggaaaagaaccgagggtcaccagaaagggcactggagacaagggggaaagccccaccctctgtctgtctccccttctctctgcctctcagcttcaccctaggactgtctgcttcccaggggcttccccacataaacaccgtgtaaggttctgggggccaaaaatgccctcccatagaggtgagatgcctgagaagccctttgcgggacagggcattggcccagagggctccaagggtgtgcaggatggttagggtggggtaacggagtctgcagaaggacagaccctaaagaacaaggggagaaggaaataagacccagttcttccaccttccaccctgactccaggtgacagttcaggtgcagccagggccccacccccacgttctcatgtagaatgtcctgggtaacggcccagacgtggggttgtatccagtacctctagattcagatgcaggtggttcttgaaccacactttggaaaaccctggatttggggctgggggaaggaacaggacagggagacaaaggtagcatggtcacatatcccagactcaagtgctccggtccagcccatctctcagtcctccaggaggagtgctttagtcctaccccttatttacagatgacaatcaggcctctcagaagtcaaggtcctatgactaggaatgttaaactgggcagcctgggtgggggaccagctggggtggaggcttgtggctcagggactgtggggacagggaggcctggactcccgggggtggaagaagtggaggcaggatggagagagggatgggtatgggaggggagggaaggagaggagacagtgggttctggaggaaagagaggggttccggggggttccgggagagtgggccagcagggacgaaccagccagggctgaggacgggggagggaggagagagccaagacattgagcccttttaaggcagcaggaaccctggccccctcccccgccccaggcctggcaggggaggggccgcgagatgcagctcgggccacaaaaggagtgctcctcccgggagcgccagacccctaccccacccggtctcagtttaccctgccaacccaacttcatcctctactaaagggaggccaggagagtcattaggggctgtgggaggttgggagaaggtttttccagaggctgaatggcctggcccttcttggcctccaccttcccatctgtgaaatgggaggaggagggaaaggaaccaggcctgggtcagaaagagatggacacaagaggaagcaggggaaggcggagaaacaggaaacaagtgtcacacacagtttgttacacacaggccaaaaaccaaacaccagtcactgagggccagacatatgagggccagaggggcagggtgctgggaatgaaagaaaccagtgaccagtgagcccgagtcctgggcttggggaggaggtgggcagacaaggcagctggcagaagcggaagcatcctccttccagccctggccccaggccctggaaagcccttgcaagaaggggttttgtgggacagctggaaggttggaggccctgggccaggagaactaaaggacgcagggacccggggtggcgggaatggtggctgacccacacggctcataggaaccgagactttggggctgggggtgggggtgggtgcagaacctacaaaagaaggagacacacccagaagaacccaaagttgtccctcctggatcgcagaggagggggcactggtggcgcctgtctgcaaagctggttctcccacagggcccgcgtgagtcaccgccctcccagtgcctgggcacctgttggggcagctggagaggctggcgccgaacacctgcctgtcggctgcgcccctggcagctgccccatgctggccctcctggcttgccccaggccacaggaaaccaggggagagggccatagagcccacttttggggggagggtcctaggagagggagctcccagcatgaccctgaccctgaccctgaggcggggtgcagagaggccatgggaggctgttggcagcctagcctgctgtgactcctaagccatggctctgagtcacagccaccctagcctctgctgaccttactctgcccctccagagtggtggcataggacagagaaatgttgccccagggcccaggtccacactctgagccccaggatgggaggatctccccatgcccatcctgccatcctgcccccccaacagccaggcctctgtgcccagacctgtctcctgccccacccccaccccatctgcaggagccccgagggtaggcactcaccccactgcaagaagtcggccacgtacttgtcctgggccagttcggaggcgcccagctcctggtggacgcccaggagaaggtcgagcaggggctccagccccaggaagcccgggtccaacaccagctgctggagccgcctcagccgcacctcggctgacatgttggacaggcagcaccatggcccctccccgggccgggggctcggggtcctcctgtcacagggcctggcagcccctgtccaggccctggagccctggctgcatgtctgcctgtccctggctgtcccctgggcctctctggccacttctctctgcggccggccgaggcctcctccccttctccccaccccttggtccagcccccctcccgcctcccagccttaacccctcacaagccagccccccaagctccctccttccagggcccttcagaacccttcagtgctagagtagggggaatgcatggagaatctcagctgtcacactgtcaccccaataaaaaggtagagcacagaggaagccacaggtgtgatgaatttcaagaagaacctgcccattgctgaaacagggccaattgaggctgagtgacccagtagcaaccacccccttgctcccgacaagctccagaactgggggctagggggtgagggctgggggttggggctgggtgggagaaaggggttgaggcctgggaaggggacgggaggccagggcagcttcttgggtgactcagagatggattccgactcggacagttaaatttagccctcaggctctctgctttataccagctttttttttttttttttttttttttcccaggaggtggggaaggggtggtgaggacaggaccaggagggggcaccctcagagcctgaacaggggtgacctgctgcccaaaggctgggggaggaaagtggtggagccaagccctccctgggcaaacgagaccccaaaatagctccttggcccctggccggggagccacattcctgcccaggctgggattagaaacagaaacatttcggggggtggagggtggcgcgggaagacacactccctgcggctccgagagccaagaggaatctgagctcttctttccagggtggacggttctccagagtggaagtcggggcctccaaccggcctggggtgcctgggccttgagagggccaggcctgagaaactaggaggcaaggaccgaggagtcccagctgggcagggcctgggaaacgtggtcctgggcagttctgataatttaaaaaacaccgaggactttgatgaggggccctggctgcgggcaggatgctcttctccccaagagggtcctgctccagccgctggtgtgggtcaccagttgtgtgactcgcaggtccgttccctccctgggctccggcttttcctgctatgaaaaggggtgggaggcgctgggctgggagcaggcctgcactcctcctctggggaaagcggactgcctagaaccacagagtacacacacaggtcctctacatcatctcctccgaaggggacagacccgctgagaaaacagggaactttagtataaataagaggtcctgcgggacagggaggaacctgaggggcttccataatttaacactcttcaaaagcacagacaatagcaagggcagctggggtgggggccgggcgagggctggaccacccccggccctgcccactcaactgaggggcacactgcagacctggggctcttgtggcaggggcggggagtctctccccaggagtgaccagtcacatgctggggacagggatgagggtaacactgatgtttcagaggaagaggtcattgtacttggcagtgggtgggggacaaggctgaggccacaagggctattacatcgcccgtgtccgggccagtctggggggcccccaaattttgtgcaggtggggggactggagcagtccatccatcatggttagtcttgttaatacgttgatctgtgaggtcagcagggagggttatggctaggaggctgggggcatggggttgggggggcccgatatccatggcttcacaccactgtgccactcggggagttgcctggttgggaggagatgccctggggaagatgagagggagagatgggaggggttagagaccacctgggcttcagccagtgtcaaggggagggagccagcccagagtccccaaagctgctgccaccctggccttgcccttgggtccgccctagaccccccagaggccactgctctaggctgggaacttgcatcttagctagcttcctgtcctggcagtcagcactttcacgcaataatcaaagtccttggcggatcctgagtgagaccatggggtaagggtaagggtgggaggggagggggaaactggagctcccttctaacttgggagggaccctgaggtgctggggaaagaactcagggacagtcctacctctaccactgacttgctgggtgacctgggccaacttccttcccctgtctgggcctcggtctcctcgtctgtgaactacggagacagaggggtctcttttaggactcaaccagactccccaaatcccaccactcttgcctctgagtcactcagactgtgctctcaagttctagggactcaggactctacgattccaaaactgaggatctgaggaaccaagccacggcctccaggaccctgggcaactgagtccaagccctaagaagctgagacacccaagacgagctccgaacttacaagatgccaggcctgattcgcctactatgaccttcccaacgccacagcccacccaggaggcaagcacatccacccactgcccatcctacaggctctgttctaagaggtgatgagttggaggtcagagggggcagtgacttgtccagggtcacagagggagtgggactggaacccaggcctgggattcccagcctgtgccttcagcaggaggctcagatcctgagtcccagacccaggctggcagccatgcccacaggcttgagctcgcccctagttttggcctgaagtactcaaaaaagtttcacgatttaaaaaacagatgttcaacagaaatagattctggttcgagtgacaggcagtaagacctggccatgtggggcccatctgctgcccttcagacggccagccttggatgccccaattcctagctggctctcacacccacccctctttctgctgcctgctgcctagggctagaccccctcactctaaggatctgagaggtcttgtactgagacactaagatttccctggcttcccctcaccccacggagccagaggctgtgacagcaacaaagccctctctctgccaatgcctgcctcttcccacgaaaggtcctgccaggtccccggcaggctggtgtggggccactcaccgccttgcccggccgggcccaggtgcagatgaggccctcctggcaggcagtgatgatgcagtcctccaggaacaggaggactgtgagccgctcctgggcgatcttcttgcacacaaggggctccagcaggggcacctcgtggatgcgcgggcacagcgcagtgcccagcaccttggcggggtccaggcggctgcggggaacagggccgctgggcttctccccaccactgccactgccgccactgccaccccggctgatgttgcccaggctgtggtagcgcttgtgctccttctctgccccccggtcccgccgctcctgcagtgtgagcgtggcgaagcggccaatgctgaatggtgtgccaggctctgccgccacacccgggccgcccgccttgcccccgccagctgggtgcgggagactgttggagcgggacagcgagcgaggcagggggcctgggccaggctcgccacccctcgagctgctggcggccggtggcgtggtgccaggtgtgccagggagggtgcgggtgcgggccaggggggggtgcgggtagagcacgtcttcagtgaggtcccacaggcagaactgcgtgtcctggcccgccgagccaaagcggtaagtaatggagccagccttgggcagtggagagagcggggcgcccccggccgagcctgtgcccgcagcctcgggctcctcctcctcctcttcgccgctccgctccccatcagcaccggctgctgtcgccgcctcctctgcccttgtggtgtaggggtcaaaggccacagcgttgacccaggacttgtggccatggcctcgagccaccacgcggccctcggtgaaggaccacacggtgaccaggtcatcttcgccacccgtcaccacgtagcggccgtcagggctccagcacacacacagcaggcccccaaagtagctcttcatgagcccacgcaggagcatggagtcgaagtggaagacgcgcaggcagccatcctggctcacacaggccaggtgccggccatcgggcgagaaggcgaactcgttgaggggcccctcacccaccgcccacttggccagcgggttgcggggtgccttgctcttggcagcatagacagagaagccctcgccctgcttcagcaggctgtactggggcggggccgaggcgcaggggtggctgacgttgtacaggtacaggtggccactggcgtgtgatgccaggaacaggctctccgactcaggcagccacttcagatatgtcaccttggtcttgtcgatcaaccgctgccaggggagacagtgtggggttgggagaaggcagtaaaacccaggcagaacttctccccgacccaaagtccccaagaaggccgttggacatggccccgctcacacagcaggtgccacaccaggcccaggtcctcctcggagagaagctcccaaactggggaagacagatggacaccaggtcatggaaacatggggaaacagaggctgctgcaaggtggccacagggtgctccaaggagcctcgatgtcccatctttggcgaggggacagtcctgcttgccacagaattgtcctgtatctcggggtcctcaacctccgggccatggaacagtagtggtccgtggcctgttaggaaccaggccatgcagcaggaggtgagtggtgggcgagcaggcattacagcctgagcccagcctcctaccggagcagcgcaccattcaatcctcgtaagagtgcgaaccccaccatgaactatgcatgcgagggatctaggtgtgcgctccttattagaatctaacacctgatgatcagaggcagaacggtttcatcccaaaaccatccccccaacagtctgtggaaaaactgtcttccataagaccagtccctggtgccaaaatggttggggaccactgtatctgtctaaccctcccccgatctttactacgtcaggcttcaagtaggaaatttcttcacggaaaggcagctccccaaaggaagcgatctttgtttggttcactattctttaaagcagtgcacacaggaggcagcttgaaggtaattcctggacaaatgagtgacaaccccccatcccgctaggtgcttagacaaaaaacctcggcatctgcccctcttttcctcatccaatccttccacaaatcctgtgggctcgaccttcaaaatacacccagaagtggctgggcgtggtggctcacgcctgtaatcccagcactttgggaggctgaggcaggcggatcacaaagtcaggagttccagaccagcctagccaatatggtgaaatacaagtagagatacaaaatctctactaaaaatacaaaaattagccaggcatggtggcgggcgcctatagtcccagctactcaggaggctgaggcagaattgcttgaacccgggaggcggaggttgcagtgaggggagatcatgccactgtactccagcctgggcgacagagcgagactccacctcaaaataaaaaaaaaagaaaaaatacacccagaatctgacctcctctcaccatcccattcaaccaccccaagcctgcaatgctgtgtgactggcctcaggctccaatgcctgggcctgtctgtcctctgcagccgccacagcgatgctctgtgaagtatcagccagcacctggcactgtcctgctctgaacacttcgcagcctctctcaagcagggttccagagcctgaggccctaatgctctcaggcagccagtgtatgcaactaaggagctgctctcccaggatgaggtgcctcccatccctgggagaactgaacaaataatcactctagtcacttctgccttccagggctcaggtgagccccaatgagaaaggctcctccacaggcttccaactaagagtaaggcaaaatctctccgtgaccttccagactctccatgagccagcccctccgttatttcttggaactcatctaccatcttctctccctcagtaactgcactggccacacggcttctgtgcaatcctgcatttgtcctagctggccccgatactcagaatgtccttcttggctgggtgtgatggctcacgcctataatcccagcgctttgggaggccaaagcaggagaatagcttgagcccaggagttcgagaccagcttgggcaacacaaagagaccccgcctctacaaaaaatacaaaagttagccagttgtggtggtgcatgcatgtagtcccagctactcaggaggctgatatgggaggactgcttgagcctgggaggcggaggttgcagtgaacgaagatcgtaccactgcactccagcatggacgacagagtgagaccctatctcaggaaaaaaaaaaaaaaaaatgcccttccccaggcaactcttctcacctgcctccttcaggtctttatttcagtatcacctcttagtgagggctttcctgaccaccctactaaactctccaagcttccctcagccccttccccactgcttcttctaaacaggccttaatcacctgctgacacacgaagacttaacttgattaactgtctgtctccccagctagactgaaagctccaaaagggcagggcctcctgtccagggccctgagatgtgatatccctagtgctgggaacggtgcctggcacagaacggatgctcaaaaactatttgtgaatggatgagctaatgaatttttaatccactgactgttccgttcactcccttcagccattcactcattctgagaatatttatggaacacctcctctggaccagagagaatgagacagaagccaagagcagtccctgcccgcggataaggtcgtttactggtatctcctcgtaggccaagttggcccaggactgagcaatctccatgtatgattctacaacagcggtcctgcaaggtaggaactggaatcccattttgcagaggaggagaagtgaggctcagagaatggtcaccttcccaaagtcacatgatgagtaaatggtgcagcagggctttgaatccaaagcctccagagcccagaactcaaagagcaagggcatcaactaagtcccgacttatttactagcctcaattctctaatctgcaaaatgggcagcacacttctgtatccactggttgatgaaaactcaaagaatggccgggcgcggtggctcatgcctgtaatcccagcacttcgggaggccgaggtgggcggatcacaaggtcaggtgtttgagaccagcctggccaacatggtgaaaccccatctctaccaaaaatacaaaaattggccgggtgtggtggctcacgcctttaattccagcactttgggaggccgaggcgggcagatcacgaggtcaggagatcgagactatcctgactaacacggtgaaatcccgtctctactaaaaatacaaaaaaattagctgggcgtggtgctgggcgcctgtagtcccagctgctggggaggctgagacagaagaatggcgtgaacccgggaggcagaggttgcagtgagccgagatcgcgccactgcactccagcctgggcgacagagcgagactccatctcaaaaaaaaaaattagccaggtatgatagtgcgcacctgtagtcccagctactcaggaggctgaggcaggagaattgcttgaacctgggaggcggaggttgcagtgacccgagattgtaccactgcactccagcctgggcgacagagtgagactccgccttaaaaagaaaaaaaaaattaaaaacaataaaaattacaattacaattaaaaaaaaaaaaaagaaccgggcatggtggctcacacctgtaatcccaccactttgggaggccgaggtgggcagatcacgaggtcaggagatcgagaccatcctgactaacacggtgaaaccccatctccactaaaactacaataaattaggcgggcgtggcagcaggtgcctgaagtcccagctactcaggaggctgaggcaggagaatggcatgaacccgggaggtggatcttgcagtgagcagagatcgcgccactgcactccagcctgggtgacagggtgagactccatctcaaaataaataaataaaagaaagaaagaaagaaagaaaacccaaggagtaaagtattcagcacaagggtaacacagcacagggcctgggtacagtaaaggcagctgtcattagctgctgtcaccccattctccatctctccctggtcctgcccctctcaggcctacactgttccgcaggcagctgcatcctaatggcatatagtgggtaggtgagaaggcagagaagttgggggctctgggggctgcaatcacctcctcattgaacagcttgctggtgtcctttttgatgagatccaggtactgcacttgacccgctgagaagcccaccagcagcgagatggtctcggtggcagcagtgaactggttgaaatcgtggcaggtgggctgggtgcccttgtagatccgcttgtcaattggcttgttgaggtcaatggacttgaggggtgggagaaaaggagttaatggtgtatgccactgaggagaaggaagaggatgttgaggttgggggaaaccactaagaggaagcagggttagaacccagagggaagtggggaggtgagtaggtggattgcgaaggacggggcaaccacagacgggaaggggacccaaatcacagacaagagtagcaaaaaagatggtaaggatcccccttgaccacagtgcctccccaaagttgggtcacctctaattcagagacacccttgtccacataatcagggttctgggtccacacagttcctaagctccgattccttttagcctcaccactccatcctataacctcagcaactcccttgggacctagtaccacactattccaagacccccaaaccttgaggtcacccaaatttccaggactctaaagcctaacatcctagcattctcttcactttgtagtccctaaaccgccacagttctgggacccgtcaaacctcacggtctcccacattttaggcccatttattacctaggggctccgaaggatccccatcatttctgggatcaccataaacggccagggttctcaccacatcgctttagagatgtcctgaatcacacctgcagattcccctgccagggcctctcattcccttgagagctcccatcagcttccggacgctcatctcctccaggaccctcatgacttccagaccccaattttctctagaatcccattcagcttctggatcccctatcaccttcaaggcccccatcacttctagacttctcctcattcctgggctcaatctcaagacccctctcccacacctccaggctgcaatactgggttctccatcacctctgggcttgcatcacctcatgattccccattacctgcagaatgcctgccaccccagaacccgggggatcccacctcatctcagataccccatcatgtccaatagtcaccatcccagaactcctacgcataacgggggtaaaggggatttcccccatcacctccaagatgcctgcccagcaccccgcgggcctctcatcacatttcagaatcctgtactccctccaatgctgtcgccctacaacgtccatcacatttagaatgcctatctcagggccccatatcaattcggggaccctcctatcagttctctggaacctccatcctttcagcacccagggccccacgatgcaggccgctcacccgttggctcccacgacgacagcagcctgggtagaaatagagctcacggcccaagttgaagcagacgcggtctccccccgagcccagccccgcgggcgtggcgggcggctccccggccccggcgctgtccggctccccgaggcgcacgaggctgaggcgcacggcgggcagggcgggcccgggtccggggcctgcgggcggcggggacgacgcggggcctgcagcgccgggaccggaggcggaggcagggccgggcgggggctgcggtggctgaggcggcaccggagtctgggcggaagccggacccgacctgcgagcggcgccgtcgcccgggagtagcttgtagaaaccctcgcgcgtgcggaattgcgacttaatctccgcgcagtcccccatggcggcgccggggcccgagccgccctccgcgccgcccgccgccatcttgggcgccccccgggccccgccactgccggactgccgcccgcagccgggccccctcccggaagccgctggcccgcgccggaaaaggtggggtcgtcgcccgggcaacgcctcttcgattggcacccagatccggaggcgggacgaatccccgcggtcgctcgggtaacggtgctgggactgtgggcggggcgagaaggtgggcgcggcctttgagcctgtgaccgacttgtggttggctgcgggggcggagcccgcaatggaaagaggcgtggccagttagaaagctcaagtccttagcaaccgcgccctgggaacgtttgcctagcaacggagggatttttttttttttttcccccacgacaaagaagccctcatccatagtccagccttcccatgaagtcacagccaaccccaagtgaccctggtctctccttagacgcccaatatacactcccctgacctccagtgtttcccactgacatattcaaatccctgaatgaccacagcatctgctaccattcttccccacccttggtgacccaccaaatccctgtgtccccacacaactcagaggacttcctctgacccactattgattaatgctaactccaaacatccttcatattttccaccaacctccaatgtatatttccatgattttcttattttcaacaacctcacttgtcctccaaaacctacctctgattcccaaattgtattgatccccacggtgccccagtgtcccagtgatccactcgtaacccaaagtctccccctgatcccaacagctcctactcatagccagtgctccccatgtctgctgaagccacccagccccatcatagatctttctagtctcatgtagtcaatggcctctacgatttctccctagagtgtcccaagggcatctcacacttaaaaaaaaaaatcctacaatggttcgggcatggtggctcatgcctggaatccgagaatcccagcactttgggaggctgaggtgggaggatcgtttgagcccaggagatcaagactgctatgaattcacatcactgcactaaagcctgggggacagagtcagactcagtctctctaaaaaaaaaaaaaaaagaaagaaaaaagaatcctacaatgaaattgacgtcttacaccaaatcctccacctctcttgcatccccaccttagggctagctctgccgtccactcagtcaaccaggccacagacctgggtgtcttcctagatgtgtaccatttatcttcactctgcccccgcttacagcctccaagtcttttgcattcgaccacgtggaattcctctttctcagttccttgttctccctgatccaagcttctcctctacccaagcccttcccccacccccacatcaaccgtgtctcttggtctcccagatttctgtctcacccccacttccacctttcacttggcatgtagagaggttttattttgtttttgtttttgttttttttgagacagtctcaccctgtcacccaggctggagtgcaatggctccatctcggctcagagacggggtttcaccatgttggccagtctggtctcgaactcctgacctcaggtgatccacccacctcggcctcccaaagtgctgggagtacaggcatgagccactgcacccggctttttttttttttttttttttttttgagacagagtctcgctcttgtcacgtgggctggagtgcaatgggacgattttggctcactgcaacctctgcctcctgggttcaagtgattctcctgccttagcctcctgagtggctgggattacaggcacctgccaccacacccagctacttttttgtagttttagtagagacggggtttcaccatgttgggcatgctggtctcaaactcctgacctcaggtgatccgccaaccttggcctccctaagtgctgggattacatgtgtgacccactgcactaggcctagagaggtctttctaaagcatgaatatgatcagggccctcccctgctcaaaacccatctgtagctccctagtgctctcaggggaaagttaagccccaagtgatctggcccctgccaacctcttttcaatctcatatctcaccactaactcctcacactatccaccacctaaaatgaggcttgaaaaactaccccaacatatcacactctctcttgtccttgggtctttgcacattctgttccctattcttggaatgcctttccccattcttttcttgaccctttaagagttggctcgggagctctgtcagtcctctgggcttccccatttgggctgtcactgtctggaaatgagtctctctccctatagtgttgtgaggtccaggaaggcaggactgcagctgtctgtgtccccagcacaggggtgggctgacaggaggtatttcaataatggtttgatggctaggtaaatgaataaataaaacaggtggggctggtcgcggtggctcacagctgtatcctaacactttgggaggccaagacaggcagatcgcttgatgccaggagttcaagaccagcttgggcaacataaaccccatctcatagtgagactctgaaaaattgaaaaaatttagctgggcatggtgggctgtgcctgcagtcctagttactcaggaccctgtctctacaaaaaatacaaaaattagtgtatgtggtgatgtgcacctgcggtctcagctactccggaggctgagatgggaggactgcttgagcccaggaggtcaaggctgcagggagctgagattgtgccactgtactctaacctgggtgacagaatgagaccctgtctcaaacaacaacaacaaaaaccaaacaggtgggagagactctgccaggcaatgtctgtgctctctgcagggcccaacagccctggcttggagtccatgtcaacagaggtggtgaacaaatgaatgaatggctcatccataatgccgtggaggaattttatttgaagcagttgccttccttttctatccctgccctctggggacaggaagcacatagtgaaaatataatccatgctaactacctctaaggggaaatttgctatctacctgcttggggaaagtggctagagggtgggcctcagtcatctgtctcctcgccctcctcctcctcctcgccctcctcctcctcctctgtggctcccagggcttgttcctgggctgctttcagagcctgctcctcttccactgtggggtcactcatctccatgatctctgggccactggggtactcttgttgaatgggggctggcagggccgggttgaagctctcggggctgtacttgtgaccccagccgatgtagatgttctcaaactttctggagaagcagtgagacactgtgaaattctccctcaaaggccccagacttgacttttttttttttttttttgagatggagtcttactctgttgcctagtgcagtggtgtgatctcgacttactgcaacctctgcctcccaggttcaagcgattctcctgcctcagcctcccatgtagctgggactacaggcacgcgtcactacgcccagctaatttttgtatttttggtagagatggggtttcaccatgttggccagtgtggtctggaactcctgacctcatgatctgcccgcctcggcctcccaaagtgctgggattacagacgtgagccaccgcacctggccagccttgactttctttaagggtaggacccagcatgtgcatagcatgactgcaaagttgtggatggcagggtgaaatgtgctcactgggttcctctgtattacccaggctggatgcaaactccacctcctgggttcactgcaaaatctgcctcctgggttcaagtgattctcccacctcagcttcccaagtagctgggactacaggcacacaccacctcgcccagctaatttttatatttttagtagagacggggtttcaccatgttagccaggctggtctcaaactcctgacctcaagtgatctgcctgcctcagcctcccaaagtgctgggatcacaggcatgagccaccatgcctggcctaatttttgtatttttagtagagagggggtttcatcatgttggccaggctggtcttgaactcctgacatcaagtgatctgccgcctccacctcccaaagtttaaaaattagccagttgcagtagcacgtacctgtggttccagctactggggaggctgaggggggaggattgccggagcccaggagtttgaggctgcagtaagttgtgatcatgccactgcactccagcctgagtgacagagtgagaacgtatctcaaaataaatcaagaaataagtaactaggctggacgcagtggctcacgcctgcaatcccagcactttgggaggccgaggcgggcggatcacaaggtcaggagatcgagaccagcctagctaacacggtgaaaccccgtctctactaaaaatacaaaaacaaaatcagtggggcgtggtggcaggcgcctgtagtcccagctgctggggaggctgaggcaggagaatggcgtgaaccctgggaggcggagcttgcagtgagccaagatcgcgccactgcactccagcctgggtgacagagtgagactctgtctcaaaaaaaaaaaaaagaaataagtaactaaaaataacaaaaaaaattaaattatatatgtggctcatattttatttatgtgagacataattttatgttggatatcaatttatttatattgtgacactttatttatgtccaacatatcatgtgggacataaataaaattgtctaggtgctggggacacagcagtaaacaaactagacaaaactccctgccaggtgcggtggttcaggcctgtaatcccagcactttaggaggccgaggtaggaggatcaactgaggtcaggggctcgagaccaccctggtgaaaccacatctctacaaaaaatacaaaaattagctgggcgtggtagtgggcgcctgtagtcccagctactcaggaggctggggcataagaatcacttgaacccaagaggtgaaggttgcagtgagctgagatcacaccactgtactccagcctgggcgacacagcgagactccatttcaaaaaataaaaaaaaaatccctgggttgtgcctacattctgctaagaggagactgataatgaacaaggaggtaagtgcccaggcataacccagcgaattcagcctttctgcagaattttaactagagaaggaagaggaatagatgggaggaaagggaggggactaagaggtagggagagagggagacagagactgataaagaggcagagagagccaagcatggtggcccacgcctgtaatccctgcactttgagaggctgaggtgggtggatcacctggtcaggagttcgagaccagcctggccaacatggtgaaaccccatctctactaaaaatacaaaaattagctgggcacggtagtgcatgcctgtaatcccagctactaggggggctgaggcaggaggacggcttgaacctgggaggcggaggatgcagtgagttgagatcgcaccactaaactccagcctaggcaacaaaataagactccatctcaaaaaaaaagaaaaaagaaaaaatttaaaaatgaggccaggcacagtggctcacgtctgtaatcctagtatgttgggaggctgaggtgggaggattgcttgaggccaggaggtggaggctgcagtgaaccgtgatcacgccactgcactccagcctgggtgacagagagagaccctatctcaaaaaaaaaaaaaaaaaggccaggcgcggtggctcacgcctgtaatcccagccctttgggaggccgaggtgggcggatcatgaggtcaggagattgagaccatcctggctaacacggtgaaaccccgtctttactaaaaatacaaaaaaattagctgggcatggtggcgagcacctgtagtcccagctacttgggaagctgaggcaggagaatggcatgaacccgggaggcggaggttgcagtgagccgagatcgcgccactgcactccagcctgggcaacagagcgagactctatctcaaaaaaaaaaaaaagaaagaaaagaaaaacaaaaacaatggaacaatgggtggacacagattgggtgggggacagaagagcgttgggtgggtgggggcagaggatggatggacaagtggagcctcaagtttgtatcatttgctttcagaggaatgttggcatatcagggtatagcctgaagaagggagttggcaaaagcaaacgtgcctcttcccagcttccagagaaggaaaaaataaatgccaggaatgtgttaaagtatccagattacatgcaatcccaccacggctgtgattcatacaggagcgaatacagtcccagttcacattgagattaaaaacgaaattctaggaaaaatcatcatgccatctggtggacaaagctggtaggtgcgcccacctccagcggcaaaccccctgtcacgcagcagggcagagggctgccaggtgcctgcgggggaaggctgaaggactgtggggagtgtgtagctgggtgggaggatgtaggagtgactttggcttgccattcttgtttgttttttgagacaaggtcttgctctgttgcccagactggagtgcagtggtgcaatcacagctcactgcaacctcgatctcctgggctcaagcaatccttctgcctcagccccctaagtagctgggactctgtagtccgtgccatcatgccgggctgattttaaaaatttttttaatttttttttttgtacagatagtgtcttactgtgttcctctcgctggtctcaagctcctgggctcaagcaatcctcccaccttggcaacccagagtgctgggattacaggcatgagccagtgcacctggcccaagcttgccattctttttggaacaactggtggtgggagggaaggtttctgccccatagagagaaaagccttccaactggaagaacaggccgggtgcggtggctcatgcctgtaatcctagcactttgggaggccaaggcgggcagatcactcgaggtcaggagtctgagaccagcctggccaacatggtgaaatcttgtctccactaaaaatacaaaaattagccaggcatggtggcatgcatctgtagtcccagctactagggaggctgagggaggagaatcacttgaacctgggaggcggaagtttcagtgagctgagatcgcactactgcactgttgcccagcctgggtgacagagcgagactccatctcaaacaaaacaaaacaaaaccacaaacaagaagaactgtccaggggaccccagggacggagttagctcctccagagagggattctgctgctgtcatcagggggctggagatccaggttcgtatcctgcaagtgctgtgtgaccatagccagtccctcccactctcttattctccttgctctcatcatgactcatcaccaagacccatcctagtgggctggtatttcccactttagccctggtgaaactcctaggagctatgagggcattagtccttggggcttcctgaagggggccctccccatctctgcccaccctggcgagttgcccagcccaaccaggcttgaagaagtcctgagagattctcctgctgggaggggctgggggaagacctacttgccactggcataggcataggccccgggccagaggttggagcgcacaacggccactgagtactgcgggcagaggctgcaggacaggcgggtggtccagggtgccaggtgcatgatttctgtggtggagaggcagcagaggggggcagcagggtcagggaggcccccaggccctgcactgcaccctgaaggaaggaaggcagcagtgagggaggcctggaggggcatgaggggaactatagccaccaacagctcgggctgcggtgtttgaaccctcgctgcagaccacacacacacacacacacacacacacacacacacacacacacactctctctctctctctcgctctcttttttttttttttggagacagagtctcgtcgctttgtcactcaggctgcagtgcagtggtgtgagctcgactcactgcaacctctgcctcccaggttcaaacgactctccttcctcaacctcccgagtagctgggattacaggcatgcaccaccacgcccggctaatttttgtatttttagtagagacagggtttcaccatgttggccaagctggtctcgaactcctgacctcaggtgatccacccgcctcagccccccaaagtgctgggattacaggcgtgagccacctcgcctggcctggaccactctttctctatgtggccccaggaagccagttcacctgtctgagcctcagtggctgcacccaggaaatggggagactcatctggcctttgttgcagggtggcagtgaagcctggtgacaaggtctgcagcacacctgctgcagtgcctggcgcccagcagggcctccagactgggaagccactgtgattccactcccgagttggtcatcggtttggaccagggtgcagagggaagggcacaggctggcaggatctggcttcaaatccaggacctgtcccctggcccactcctagcctctctctccacttccctccgggtgcctgaggccccaaccttaaaaaattcctgtccattcatccaaaatccagctccaggttgggcacagtggctcctgcctgtaatcccagcactttgggaggccgagtaaggtggatcacttgaggccaggagttcgagatcagcctggccaacatggtgaaaccccatctccactaaaaatacaaaagttatctgggcgtggtggcacacgcctgcaatccagctactcaggaggctgagacgggagaattgcaggaacccgagaggttgaggttgcagtgagccaagattgcaccactacaccctagcctgggtgacagagctggactccatctcaaaacaacaacaatgacaacaacaccaccaccaccacacacacacacacacacatacacacacatgcacacacacacccagctccagtctttaggcagggttccccaactacatccccttccctccaggcccaaactcaaaaggccatatcctaaggtttaggccattgccacgtgtctatggacatgttcccagaacctcctgatggggccactgtgattacacccattttttagctgagagagcctctgagcctgggagggaaggaccggggagatggaccccagcagtccagccacccctccctttcttcccagccctccccagccagtggtgtacaggctgagagggcttccttacctgcatcttctgaaagtggcgttagcagtggggggccaacctcctgctccacctcctctggcccctcatctgccttctcttcctcctcccccaggtcctcctcctcctctgtcttctgcaaagggttcacccaagtgcagcggccctgggggtggggggaagctcaggtgatggccccagtgcacggaacccagcctgcctcctgtgggggaggtgaagggccaacaggcatagccttgtcctcagagacccaggcacaggcaagagggcaagatttagccgcacagctaaggggaggtgggaaacgggctgacagaactgctgtgttgaggtgaggactcctgactgtgcgacccccattcatgcattcattcactcattgaatttttttttttttttttttttgagatggagttttactctgtggcccaggctggagtgcagtggcacaatcttggctcactgcaacctctgcctcccggtttaagtgattctcctgcgtcagcctcctgagtagctgggattacaggtgcctgacaccacgcctggctaatttttgtattttttagtagagacggggtttcaccaagttggccaggctggtctcgaactcctgacctcaaatgatccacccgccttggcctcccaaagtgctgggattacaggtgcgagccattgcacctggcccactcattgattcttttcttttttttttttgagatggagtctggctctgtcgcccaggctgaagtgcagtggctcactgaaagctccgcctcctgggttcacgccattctcctacctcagcctcccaagcagtggcttacgcctgtaatcccagcactttgggaggctgaggcgggcggatcacgaggtcaggagatagagaccatcctggctaacacggtgaaaccccatctctactaaaactacaaaaaaaatagccgggcatggtggcgggcgcctgtagtcccagctactcaggaggctgaggcaggagaatggcgtgaacctaggaggcagagcttgcagtgagccgagatcacgccactgcactccagcctgggcaatagagcgagactccgtctcagaaaaaaaaaaaaaaaaagccaggcatagttgtggtggtatgtgcctgtagtcctaactactcgggaggctaaggtgggaggattgcttgagccctggaggtcagggtagcagtgagttatgatctcatcactgcacgccagcctgggcaacaaagcaagttgctatgtcttaaaagaaaaaaaaagctgggcatggtggctcatgcctgtaatcccagcactttgagaggctgaggcgggcagatcacctgaggtcaggagtttgagaccagcctgaccaacatgaagaaaccctgtctctcctaaaagtacaaaattagttgggcgtgatggcacatgcctgtaatcccagctacttgggaggctgaggtgggagaattcgcttgaactagggaggcggaggttgcggtgagccgagatcacgccattgtactccagcctgggcaacaagagcgaaattctgtctcaaaaagaaaagaaaagaaaaaaaaaaaaaaccagccagggcgcagtggctcatgtctataatcctagcactttgggaggccaaggtaggcagattgtctgagctcaggactttgagaccagcttgggcaacacagtgaaacctcatctctactaaaatacaaaaaattagccaggtgtggcagcgtgtgcctgtaatcccagctactcaggaggctgaggcgggacaatcgcttgaacccaggaggtggaggttgcagtgagccgagatcgtaccactgcactccatcctgggtgacaagagcgagactctgtctcaaaaaaaaaaaaagaaaagaaaagaaaagaaaaagaaaaaaaagaagaaagaaagaaaagaaaaaaaaatgcctctgtccccaaaggtttctgatgggattatccgctaatatctgttgaaccaatgaatggatggatgaatgaacgaatgaatattagttgcccagcagagagtaagagcttgatgtcagtattgcagggtcatgcgtgagccccctgctcctgccgtttgtgagaggcgggagtcccggcgctcacctgcggcaggatgtgctgtgtgtgatgcacccagttggccatggagtcgaccagctccagcacggggatgccctcgaagtccgggttctcctcgtaggagtcgcgcccagcaccaccttcctcctcctcgtcgccctcctcctcactaaactggtagaagcccagcgggctgacctgcgtggcggccgagatgcgggctatctgggcccgcaggtagttggcctcgttgcccgggaagggtgggtagctgacgactggcgtgtccaggtagcctgtgaagaacttcttgatctttcgggcgttcacgatctgggctggagtgacgtggggcagccgcgtccatggcaggcccggctcgttgcacacaaagtacaggtacttgttggcgcctgagcggctctcctccttggggatcacgggcggcggcttccatacggacttagggacgatgtccacggccttctcctcgtcctcctcgccctcctcctcgccgtgcgcctccatgacctcgccaccttccgtcatctcctccacctcctcctcctctgcctcctcctcgccctcccggaattccacctcggccaccaggtagctgcgtttgattcccaggatcttgccccagaagcgacaggtgtggatgggctgctgctccaccagctgtttcatggccaggaaaatgcggaagctctcgtccgagctcaggccgacgccggcctgctcgaagtagaaggcagtctccatgatgttgggcactggtgtctccccctgcgcagggtagggtggagggcagaggggagaatgctgaagctctgctccctagcctacctcttccagactcttctagagtcaagagagctaaaagaggccgggtgcagtggctcacgcctgtaatcccagcactttgaaaggccgaggctggctgatcacttgaggtcaataattcgagtccagcctggccaacatggtgaaactctgtctctactaaaaatacaaaaattagccagccataaaagcaggtgcctgtaataccagctacccaggagactgaggcaggagaatcacttgaaccggggaggcggaggttgcagtgagctgagattgctccacgcactccagcctgagcaacaaagtgagacacggtctcaaaaaataaaaagaggcctgatgtggtggctcacgcctgaaatcccagcacttagggaggccaaggcaagcagatcacctgaggtcaagagtttgagaccagcctggccaacatggtgaaaccccgtctctacaaaaaatacaaaaattaggcaggcgtgatggcaggcacctgtaatcctagctatttgggaggctgaggcaggaggatcgcttggacctgagaggcggaggttgcagtaagccaagatcacaccactgcactccagcctgggtgatagagtgagactcccactcaaaaaaaaagagaaagaaagaaagaaagaaacctaaaagattctgtaactcagctgctcaggccacttgtgctggccagtgagatgtagggaaagcccttggacaggatgtccctgatggagaagaaaagggaaaaccacactaggagaaaatttttcttgccttttgtcattccctattcttcctgcctggaatggggatataagatctggagccacagcagctatcttgggaccatgaggcaacacatgggagacaaagtactacacccttaatggtggtggagatgaaaggtggaaattgcctggtccccagtagcattgctcagctgccttacccaccctgaccttcttgctcctgtaacaaagaagccacttttattcatgatttctgtgacttgaggcccaatgcactcctaacacatactccatgtttcacagaaagttaagggagaagacaggtctcgaacggaggagtcagtgatgttagaggatggtaataagtcctgtcttcactgcctccatctataccgtgtgcttgattcacacagccagaggatgggtggggtggaggagaagaaagaaggagaggaggaggaggaaaaagaggaagaaggaaagaaagagaaagacagaaagacagaggctcagaaagggactgaaggcaagcaggctgaaactagaagccagcaaagtttatggctgggcgcagtgattcacgcctgtaatcccagcactttgggaggccaaggcagggaaatcacaaggtcaggagatcgagaccatcctggccaacatggtgaaatctggtctctactaaaaatacaaaaattagctgggtgtggtggtgggcgcctgtagtcccagctactcggaaggctgaggcaggagaatggcatgaacctgggaggtggagcttgcagtgagtggagattgcaccactgcactccagcctgggtgacagagtgagactctgtctcaaaaaaaaaaaaaaaaaaaaaaaaaaaaaaaaaaaaaaggaggccggccaagttttggctcagaagccagagaaagaagaagtgtaatgtacatctgcacgggccacacaccaatgctcttccttctcccagggaaatgcctgccagcccctatccatgtggccacaaggctgtccccaacactttattattcaaccagtcccaaaatctttattatttatttatttattatcattatttttgagacagagtcttgctctgtcacccaggctggagtgcagtgatctgatctcagctcactgcaacctccactcctgggttcaagccattctcctgcctcagcctccccagtagctgggattataggcgtgcaccaccacacccagctaatttttgtatttttagtagagatggggtttcaccatgttggccaggctggtctcgaactcctgacctcgtgatccgcccgtcttggcctcccaaaatgctgggattacaggcctgagccactgtgcctggcatattattattattttttaaaaattattattattattatttttgatacagagtcttgctctgtcgcccaggctggagtgcagtggcgcaatctcaactcactgcaagctccgcctcccgggttcacgccattctcctgcctcagcctcccaagtagctgggactacaggcgcccaccaccatgcccggctaattttttgtattttaagtggagacagggtttcaccatgttagccaggatggtcttgatctcctgatcttgtgatccacccaccttggcctcccaaagtgctgggattacaagcgtgagccactgcgcccggcccattactattttttgagacggagtctcgctctgttgcccaggctggagtgcagtggcacaatctcggctcactgcaacctctgcctccaggattcaagcgattcttctgcctcagcctcctgagtagtcgggactacaggtgcacaccaccacgccaggctaatttttgtatttttagtagagacagggtttcaccatgttggccatgctggtctcgaactcctgacctcaggtgatctgcccgctttggcctcccaaagtgctgacataacaggcgtgagccactgcacccaaccagtgatgggatttataaccaagatactgtgatgctgaaaacagctctctttgtttagggacagctagggagcctgggagtgtggggaataggcagctctcagtgcccttcactgcagagccaccttgcaagactaggaccttaccagtcctagactacacctgacgattctgtgtgagaaaaatgaccaactcatccaagtcacttatttctatttatctgacatcatctatatcctaacttaaagggacctatgttgtcaaacaagtaaaataaggtgttagtttttggaatgtgccaaaataatcctaaagttagtctaaaattatagatgtgggcgggcgccatggctcacgcctgtaatcccagcactttgggaggccgaggcggacagatcacctgaggtcaagtgttcgagactagcctggtcaacgtggcaaaatcctgtctctactaaaaatacaacaaattagccaggcgtggtggcacagcctgtagtcccagctactcgggaggctgaggcaggagaatagcttgaaccctggaggcagaggttgcagtgagctgagatcgtgccactgcactccagcctgggcgacagagcaagactccgtctcaaaaacaagaacaaaaattagccaggcatggtggcgggcacctgtaatcccagctactcgggaggctgaggcaggagaatcacttgaacctgggaggtggaggttgcagtgagctgagttcacaccactgtattccagcctgcgtgacagaatgagactccatctcaaaaaaaatggaaaaaataaaataataaaataaaattatagatgtgagaatagtcaaaacttatctttttttttttttttttttttttagacagactctcactatgttgcccaggctggagtacagaggctcaatctcagcccactgcaagctccgcctcctgggtccatgccattctcccgcctcagcctcctgagtagctgggactacaggtgaccgccaccacgcctggctaattttgtttttgtatttttagtagagacggggtttcaccgtgttagccaggatggtctcgatctcctgacctcaggtgatccacctgcctcggcctcccaaagtgctgggattataggcgtgagccatcaagcccggccgagaatagtcaaaacttttcttttttttgttttttgcttttttttttttttttgagacggagtctcgctcttttgcccaggccagagtgcagtggtgcaatctcagctcactgcaagctccgcccaccaggttcacgccattctcctgcctcagcctccccagtagctgggactacaggcgcctgcctccacgcctggctaattttttgtatttttacaagagatggggtttcactgtgttaaccaggatggtctcgatctcctgacctcgtgatccacccgcctcggcctcccaaagtgctaggattacaggtgtgagccactgcgcctggccttttttttttttttttttttttgagatggagtctcgctctgtcgcccaggctggagtgtagtggtgcgacctcccctcactgcaatgtccacctcccagtttcacgccattctcctgcctcagcctccctagtagctgggactacaggtgcccgccaccatgcccggctaattttttgtattcttagtagagacagggtttcacttagccaggatggtcttgatctcctgacctcgtgaaccacccgcctcagcctcccaaagtgctgggattacaggcgtgagccaccgtgcccggctagtcaaaacttttcaaaacagaggttcagtgatggggagaattatgctaccaaaacagcaacacctgccgtgcagctgctgtcagcagtaaacaggagagtcctagagcaggaagccatccacagagcaaaggccgggagcagagactcctgcaggaccctgtgtggggagcagatggtgcaggtggcatttcaaagcagtgggggggcaggaaggaatggtttattgcataaatgccattcaaggtcctggctagccgtctggaagacagaaaacgagagaaataagagccttgccttgacagaaaaagaaacacaaaatgctgaatcatgcattttttatgagtcatttcctagaagcatgtacaggccacaaaagcccccagttttgcccttccacagaccccacattaagaactccagctcttggctgggagtggtggctcacgcctgtaatcctaatactttgggaggccgaggcaggaggatggcttgaggccaagagttcaagaccaacccggccaacatagcaagacccccatctcaattatttttatttatttatttatttttatttatttatttttttgagacagagtctcgctctgttgcccaggctggagtgcagtggtgtgatctcggctcactgccaagctccgcctcctgggttcatgccattctcctgcctcagcctccggagtagctgggactgcatgtgcctgctgccacgcttggctaatttcttatatttttagtagagacggggtttcatcatgttagcaaagatggtcttgatctcctgacctcgtgatctgcccacctcggcctcccaaagtgctgaggttacagatgtaagccaccccatcctgccaagactgaagttgttttgtgactggattgtgcaatgctgtctttcgcctccaggccttggcacaggctgtgccctaagtatgcttgggcccccactgaccctgatgcccacctctcctgactggctcactcaccacctcctcctccatctcctgttcgccttcagtgccgcctccactccgggtgaacagcgccttctgtttctccgccatcttgtaggtgggctgcatctcggggtcgtcccgcagcgtgtccagcttggggtggaaccactcccactgcgtggtgcggttcagagactccaggacagacaaggggtcctcaggccgctggttcaggatcttggtcagcagattcaccaggtgctcgtacctgcctcccgcaggaggagtgggaggagagggacctcactcactcagctcactgagctggctcccatgtgcctggccctgtgcctggtgctggggacacagtagggaactgaaaaggtccctgcccaggtgtagctgacatttatttatttatttttatttatttagtttttgagatggagtcttgctctgttgctcaggctggaatgcagtggttcatctcggctcactgcaacctctgcctcccgggttcaaataattctcctgcctcagcctcccgagtagctgggattataggcgcccgccaccacgcctggttactttttggatttttagtagagacagggtttcaccatgttggtcaggctggtctcgaactcctgacctcgtgatctgcccgcctcagcctcccaaagtgctgggattacaggcgtgagccaccgcgccttgccgacattcttatggtggaaacagacactaatcaaacgagcaaaatatatacagtgtgtcaggcatggggtggtaatttttagggtgacacatatagtactgaatggggcctgggggtgccagggatgggagaaggtttgcaattttatttttttaatttatttttcagaggaggtctcgctgtgttgcccaggctggagtgcagtggcacgacctcagctcgctgcagtctctgtctcctgggttcaagcgattttcctgcctcagcctcccaagtagctgggattacaggcatgcaccaccatgtcccgctaatttttttgtattttttgtagagggtttcgccatggtggccaggctggtctcaaactcctgacctcaggtgatccaccttcttccgcctcccaaagtgttgggattacaggcgtgagccaccgcacctggccaacatttgtattattattattattattattattattattattattattattattagagacagagttttgctttgttgcccaggctggagtgcagtggtgtgatttcggctcaccacaacctctgcctcctgggttcctgggttcaagtgattctcctgcctcggcctcctgagtagctgggactacaggtgcacaccaccatccccggctaatttttgtatttttagtagagacggggtttcactatgttggccaggctggtctcgaactcctgacctcaggtgatccgcccgtcttggcctcctaaagtgctgggttaacaggtgtgaaccaccgtgcctggccaacatttgtattttttgtattttttttttgagacagggtctcactttgtcactcaggctggagtgcagtggctcggtcttggctcactgcaacctctggttcccgggttcaagtgattctcccacctcagactccccagagctgggattacacgtgtgccaacatgcctggctaatttttgtactttttgtagagatggggttttgccatgttgcccaggctggtctcaaactcctggactcaagtgatctgcctgcctcagcctccccaactgctgggattacaggcgtgagccaccaggcccggccacagtcagcctttgaaaccaagttggtctgatttccaagcatgtatgtgtcaccttttgctttgcggaagctgttttgttggcagtcttgggtgtggtgttgggccatcatggaagttgggaagggtaagaagaggtgagactttggctagggcttctcaggaagagagcctgaagctctgaagagctggcacttggggaatagccagaggttaattctgactagattctaggatccgaggaaggagcaggtagtgactagaaatcaagtttggtcagcggccaggggctgaaccacgtaaggccttttgtttgttggtttgtttgagacagagtctcgctctgttgctcaggctggagtgcactggcacgatcttggctcactgcagcctctgcctcccggttcaagtgattctcctgcctcagcctcccgagtagctgagatcacaggcgtgtgccaccacgcctggctaactttttgtatttttagtagagacagggttttgccatgttggccaggctggtcttgaactcctgacttcgagttatctgtctgcctcagcctcccaaagtgctgggatcacaggcatgagcaaggccttatatgtctcaggccaggagccttgaaggttgtggtgaggagtctgagcttccccctgtgggcaatggggagccatagcaggttctgagcattggagggacacggccagctttgtgctttaataagaaccattacttcatcaacctcatttctcccgctctccctcttcctcccttggttccagacacaccagcccctccttactgctcctcaaaaacagcaagcctcagagcctttgcatttgcagtgtgctctgcctggctcactcttcctccggtcatctgcaagatgctctccctcgactccttcagggccctaatcaaatgtcacctccttggacaggccttcactgacccacacaatttatttttttgagatggagtctcgctctgttgcccaggctggagtgcagtggcacgatctcggctcactgcaacctctgccgcccgggttcaagtgattctcctgcctcaacctcccgaggagctgggattacaggcccatgctaccatgccctgataatttttgtattttttagtagagacagggtttcgccatgttggcaaggctggtctcgaactcctgacctcaggtgatccgcccgtcttggcctcctcaagtgctgggataacaggcgtgagccaccgcacctggttggacccccactatttcatgtgttccctagccctcttagcctcccttatttttcacctgagtccttagcttcagtttatcactttttctgtttcttgtccactctcctagaatgagagcatcctgggtatctaatggaggctgagagcagtgttttgtgactgtagctaagtggctttggcaagtatcttcctcaggcagggaggtttagttgcaggataagagggtctcaggagggctgggcacggtggttcatgcctgcaatcctagcactttgggaggctgagatgggcggatcacttgaggtcgagtttgagactagcctgggcaacatggtgaaatcttgcctctactaaaaatacaaaaattagctgggtgaagtggagcgcgcctgtaaccccaactactcgggaggctgaagcagaagaatcacttgaacttgggaaggagaggttgccctaagccaagaccacgccactgtgctccagcctgggtgacagggtgagactatgtctgggggaaaaaaaaagcaagagggcttggggagccaaatcacgtgttctggaatcctgactctgccatatcctagctgtgtagttttgggtaagcgacccaacttctctgtgtctcggtctcctcctctgtaaagtaggatgagctgatgtgctcatctccggtgagaattaggtgagtgtgtgcagtgccagcacatgtctgggaagtgaatgctagctgttgttggcattgattccgactcagctgaattagagtcactggttttccatgagggatgatcccttgtctgactgactgaggcaggcacttcgggtggggcccctccctgcctgggtcccccacccgccccactcctagcccctgctcacaggctgaggtcgcaattgatgctggtctgcagcaggtaggccttggcgttctgcacggccagctccagaggctcgggctcaggcacctgggcactgtagtgtgggaagcccagctcagagggcaagaactgaagggcagggtcatcccttatgtaaggcccgtgctgggcaccttcagagaactggtctgtctggtagaggttgaactggcccaaggggttgactgggggctcctggaaggtggggtccagttgctggaacaggctgctttggccctgctggagccgctgcagcattaggctggtggtgagctcggcgacctgcatcctgctttcatcagagtaaggctgaggctggaactctgagggaaagcccgtgttcacagatgggtactccatgccacccagccgggcttcctcagcctggaagacctggggcatcagcaagttctcctgttgggacaggctgcccctctgtgaccaaccaggggcgtttcgctgggcgtctggaggtatctgctgcctctcctcggggtccgctgccagggcctgagcttggtcccgactgtgccgcctctgggaggcctgagaagtcctccggcccggaggctgctgggcagggcgctcagggtagggcggcaggtctcccatggttcgccaggaggcacagatctctaggagaaaggcttgcagacaaggaggccaagcgagagccacctgtcgacaccgccggtttctgagcaccgagagagggggccgttacccgtggagggcgcggggagcgggccagggtgggttccgcgcaggctctgggcgcgcactcccgatcccgcgcagccccacggtggacgtcgcgccagactcgagacggcacccgcgccccaggcccgccatccctttttttttttcttttcagtaacttgcccaagttcacatcttttatttctttttaaggcaaagcacccgcaggtcaagccccgccccgtcccccagccccgagtccctgtcccaccccctttccccctcgagccccgtcagctgttccccttggcctcgggttccctggcgtcctcggcagccgggctgggagtcttcatagcatcttctccaacaggtgcgagggtctgggggctccgctcctccttcaaggtcagcccgcccgctgccgtctcctggtgaccggggaaggaaagggcagccgggtggagggcgcggtcacctccacgctccccttcaggccctgccccctgatggcccctcctcccccaccttcaccccggcccagatccggcttcttccttcgcagcggaggctgctctccctaccttgggtagggggccctcgagactagagtccaacagcgcggcctcggtcagccccgagtcgtcatccatgctgatgaagatgcccggggtctcgcactcaggcccctcctcccggaaatccatggcttcctcagacgggggcgggcctggccgggccgacggagagggagagggggaggaagaggagggggctcccactcctcccggcttcagcttctgttcctcctccagctgccgctttaaggccttctcctgggccagtcgcaggccgatgaggtcctgagggggccggggtgctggggccggggccaaggtcaggggctccagatcatcctggggatagggagggccacacagaagctcagaggtgggtggctcagaggacggccggaaagagaaggaaccaccctgaggtggtctttgagttcttcaccaagagcatggggaggaaggggcagttgtcccccagacccccaactcccagcaggagcatcccctgggagacgggtggcccagaggcaggggtggcctgagtctctcggggtcaggaggaggccatggtgagccttgctggcttggggtagggggtgggagtctggggatccagatgggtgggctgcagggccctcacctcctccaagggccccgcaggcgcctccttggcctctggctcctgcttgccgctggcctccaagatggtcatgatggagttagggatgtgagcttgctgggtggagagcaggaagggggcgctgggggcagctctggcacagagaccccatttgcacacctcaggtccgggggccctaaccctccagaactcccagcagtgcagggccttcttgtgtccgcctccatccagtccccaccaaccagagggacccagggggccgcccaccgcacaccctgggtggggggaaagggtacctggtggggggaaggggtacctggtggggggtgaaggagcggacatgggccagcaggggctcccggagctctgggcacttgtcaaagacggctcccagctgctggggcggcagctgcaggatgacctggaagctctggggctttgtgcgctggcagcacttgatgaagccctcccacaccttggggtacttccacacctgaaccagggagggagggagccgtcgggagaggcacacaggcatccccccgagccttgacactgggagaaagaccttgccaagaccatgcccaaatcccaccatccaagattcctctggatgggcaacaagcagccccgacctccctccagaggcctttgtcttcccgatccaggcggctggaccacgagggcaacttgggaagggggtggaagaaaactcagccgccttttaccagagctccccctgggccaggcccaggctaagtgctgcgggagcacctctcatgacattctcacggcagcctccagggggcgaaattacccctgctaaacagcggaggtccgtgccggtgccgggacctgtcctgggtcacatgtacattctcaccgcagcctccagggggcgacattagtcctgcggggtttggtttttttgttctcttttttttttttttttttttttttttttgagagatggtcttactctgccgcccaggctagagtgcagtgagtggcgcgtttcttcctcactgcagccccaaactcctgggctcaagcagtcctcctgtctcggcctcccaaagagttggcattacaggtgtgaaccatcacacctggccttatcgtggtatttctaaagcccaaatttctagcacctcttaaaaaactgggccatttttcagctctgggatgcatcctggccgggcacacagcggtggagggtgaggagcagccatgcctctcccgggtgcacaccccttgagggttaccacagctcctaccacccagctgccctccctcatcacctgggagctggcccagtcatacaccctggagcactgctattttcttggcaggaggcagagcagagcctgctgtcctccaccgggctccctccggggtcagacgggggaaggggagggcaagcaggctagaagctgctgtctgcagcctggaggcggggtggccggggatgggttacctgcttcatgatgaggcgggacaggatgttcatgacgaagccccccaggcgggggtacatggtcagggactggatgacggtcctcatgagcagcatgggcagggggctctgctccatcagctgctgcatcaccacggccagcacctctgacgtgtacacgttccgctccgcaaagcacaggttggtggctgcgaggaggcggagagtgggcctgtcctctctgcccagctgccccctgggaggtgggagtcccggcctctgctgtctgcccatgtgaggggaagacttctaaagccctgacttctaaagcccctgcgggagagaggagactcccccgacccagcagaaggcacactgcaagccccgcccttggaaaacctgcaggcttggttcaagggagaagacatccaactccaggaagccccaaaatgggtggaacagggaacccgtggcccctcactttaaggacgaccttgggaaagatgtgttgccaagccctgggggagtggcagggccccccacccctgctagggagggaaggcagctattggtttctaccagcccctccagagagaacagcagtccacagaccagcttgtcagagggccaagggactgcccacccagtcctgacaaggatacagggcttgcgctggtgctgggaagatggggggtgccaggctaagggctgtgttgggcatatgggcacaatcagagtaatagcgaagggagggacaagagaaggctggggccggggcatacgatgaccccccgactcaacacccagtgccagtaccagtaggacccagagggttggcacagcacaagcacccatgaaggcaggccctggggtctgttccccgagtgggtggccatgccccaatccacagtgctaatgggaggccccaggagctgcctttgaagcccttccccaaacaccacttgccatgtgagtgtcaaccaggaagtctttattgagccagaagagcaccccaaccccccaaatccttgagaggctaatggagaacaggggtggggtctctaagggggggggcgtagacaggtggggaggaggctgaatgggcagagcagacagtggaggtgaggacctgccagaaaccgaggaagcccctgctcctcgtcagggccaggtggtcactggtcctgcctgctcagccaccccaaggctccagaatcacccctcccctcttccttccctgtcggctttgccccagccccccacctgggcctcccccgagcctccgatccattctccatatagcagcctgaagggtgttttggaaagctcagacctgacttgcctcccagagaccctcaagaaacaaggtcaaattcccacctcggcctgcgagactcctgtgtgggcaggccccaggggcacctttcccaatggcgacagcctgacctcctcccttgaccaggccccctccttcgtcccctaggtccagaaccagccagcaagcacctccctcggtccctgcagtctcctgctgctgccgcctactcatccttccttggtctcagcctgagtgtcccctttttcgggaagtcttccctgatgtcccacacccaggctgggttacatggcccctctgggctgcccagtcccaggccacccctctcagttgttactggccagggacttcttgtctctccctggactgtaagccctggaaggacagggctagggctgtctttcctgtgtccccagcactacccaggatggatatgggtgagcagaggtgctgacttttcttaatgctggactaccaggagtgggtctagttatagacaagctccccagaggaacagggtggtctacgggggagtgaacagtgcacaacaaaaggactcgactttgtgatctggagcttagagtgcaaccaggaagactgctggtgcctgagcaggagaaaaacttgggttgggtgctggggacaccagctggagggttgtctggcctgcagcgtgcacgcctgggcgtgttgaagggtggggtggtgtagggtaggccctgctgacccctctgggggcctcactcctggtggcctgtgtggcctctggcaaggccctttctcctgggccaaggatcttcaggggcctggctcctggtggcctgtgtggcctccgacaaggccctttcttctggacctaggatcctcagggcttctaatctgggtccacaaatggccttggggtgtgtgtgtgtatgtgtgaaccccctcaaactgtatgcaaataatatgagcatactgtcctgggaatgggctagaactttcctcagatcaccaaaggggtcggggaatgtgaagaccacagccctggcctatgagcctggagatctttcctccctgctggtctcccacgagaggccttggtgcctcctgggttttataatgtgggtttgacatttccataagctgctctcttgaccttaaacgtttctcagagaacttgcagaggaaggttaggaagtaagtcactgaaaagctgtttcaagctagaacacgaaagtaagcagcacagagaggaagccccttcccgtctgagggtgagaagagaaatcaaaggacagcagtcttctgagtatagagggcgacagtgagggtgtccagctccgtgggacaggatggctcctggcccagaaaccttgctcaggagggatggaggggtgggcgctctcaggggaggtggtccttagacgcggaaccggcagagctgggattcccacccaggtccgtttcacttcagattctgtttcttctaccacaccacttagcttctgcttggccctgagtaagtcacctaacctctctggagcctccatttcctgtctacacaatggaagtgaacatacccaccaagtggcggaccagcaggctcaggcctgtaggcgttcagggagagcccagcgcagagtgctcagtgagtgggggccatcgtgaggcggccagttcgtcaccaaccctgccgccctgcaggcaagctctcctgcctcacctaccctggcccacaagtgccctggagccctgggtctgccctgctgctgcgcctctaccactcacggtgtgccctgcttccttctgttcctcggggctaggggtggggctacccaactgctttaggcccactctgtgccagggcacagcaggtacatcagaggcagaaaaaggtgggttgtaaagggtaaaacctgggaggaaggaaggaggagggagggagggagggagggaagaggaggcaagaaaaggagggagggagggaggtggctctccagagctctgaggtggggctgtgagtgacagtctttgacttggcagattccagtgggggcatgtgggtgactgaggtcctgccctggcgtcgcaggggccaggccactggagtgggggggaagcgcctcacctttgatgatggatttcatgtcgcacttcacggagtcaatgttgtgtaatgcgatcaggagctctccagggttcagcggggacaaggctgagtttccctcacctgcagcaggcgggaggaagggtgggggaagacagtgcggacgcataagtgaagagatgggtctgagttccccagatcgggggagctgcgagcaaagatgaggtgccctctgctttcagggctggaacaggggaagcgactgacaacataaaaaggggacaccgaaggcagcagcagccctcaggcagcgtgaggttgccactgtgtgctcctccccatcctgggctcccaccctgggtagcgtgtggcacggctgggtctctctgcccctgggctgtgcacccccgagggcagggtaggaccacctcctcgtgtggtccccaacacagactccaccgcggcacagggggtcatgggcatttgtggcacagggcaagatggagccaggctacaggcttccaaaaagtggctggagccttctgctgtgtggggcctgggggagtggaggggaggctggtggagtggctctttgctgctgctattttgatggtcccagagccatctatatgtgtgttttaaaccaccagggtctgcgtggaacagacatcctccattttttctctagcaccaaccactggggtaagggtgaacaatcccttgctagtttttctaagttgaaagttttgcttctttttttttttttttttttttgagatggagtctcactctgtcatccaggctggagtgcactggcacgatctccgctcactgcaagctccgcctcccgggttcatgccattctcctgcctcagcctcccgagtagctgggactacaggcgcccgccaccacgcctggctaattttttgtatttttagtagagacggggtttcactgtgttagccaggatggtctcgatctcctgaccttgtgatccgcccgcctcgcctcaagttttgtttctttttgactgtgtcaaaacgaaatgcccctggcccacagcttgagggattcgggcaagatctgaggaggggccagactggagccgggcctgagaggggctggtgtgtggccagatcctaaaagggaagatgctgctggagcctccgcccctagctccacggtcttgcccctgctgtgaatgaaaccatcataaaaatatcccagagggtggcctgggagctccgggacacatggagatgtccagtacagctggtgtcccagggagcaggatgtgccctctctccctgaggggggtgcctgcaccttgccttctgccccagcacctggggtgggtgggcctcttggtggggatgaggctgcatcacctaccatgctgggtgcccagcaggcggttgaagacttccttcaccacgatggggttgagtttgatgagtttaggcagggcctggatcacctctttctacagggagaaggtggtgggggtgggagttgagtcacatacaccctcatttcccttctagacaagccaccccttctgctcgccctggggagctgagggcaagctctggctcactgagcccctcctaccctcaccacaccctcagggcggagctttctccccagctctcaccccatctgagccccctgcatgtcacatgtgtgtgcccccaagaggcatcctgatccttgtctgacagaggagaaaagcgagtctcaaagaggggaagggacctgcttgaggtagaggaggaagcagcagagccattggcacccgggtgcccatgcaaatgaggccaggagctgctccgcatttccagggtacccaggtgtcggcggcttccatgacttctgaccacaggcaaggtgccttctgccctctgctatgtgcctctggctcaactgctgctgaagcaacgtgctgccctgcccctcccagtcccacatgtcccaggtagcagggacaaacaggcctccagctccataccttctccagcccattgagcaccgggatgaggaagcggacgtctggcagtcgcttgtggtagagatcccggacccgcttcaccagctctggggagggtgggactgcatggaagcagcaggaggcaccaagttggaggcggaggggagcgtgggaaagggtgggcacccaggaaagagaagcaggcaggtgtgcaggaagggatggcaacttcacccttggctgctcacgtgcaattagcaccacactgttccaaatggagaaactgaggccctaggacaggcacagacccgcaagaggtacgaccatctggggacccagcagctcagatccccagggcccggggaaggctaaggagagggaggaaagccatgaaaggtgggggtctccagggtcacctttgtctgtgaggctgtgcagacatctcgtgaccagtgtctctgctcccttgggacaattttccaccagcaggagcagctccggggagttcatgcccattcctcggatctagaggcagagacagggatgaccagacccagggtgagagcttaggggagggtcaggtgttgcccggcagggtggcttgcggggcatgctggcgcccagggtgagactgaggtgacagggtttggagggcgggggaaaggtggggaagggcaggagagtcagaagaaccttggcatctccctgcagctcctccagacatgggcctgctccagctcccagccctggctgggctgtcctcctgcgggccactcctctgtggctcagacttgacctgacctcgaatgcccaccctgtgcttcgttcactggtgaagatgtttctggctccacccacctgcttcgtgactcggtttctcaggcgcagctggcttggctgcgagcccagaccaggctccacctgctgctgcttcctgagcctgctctgcggtgaatgccaaacaggagccagggccaggctccacctctgcccagtaacgtttacgctcctgactaaaaccgactgtctctgccctcgagaagctcacagccctgccagataacttttctgcaaagtgagatcacttttccacagctggaccaccttgagaatggggctaaaaatctgtttcctcccaactacaagcctgttatccccattttccaggtaagggccccactgaacccaaatggcagataggtggggattaacatacacttctctctcccgtttatcacgaaaatgttctgtaatccaaaaatgtcaggggcagaaagaaaaaaagtggtttcaaatcctgctgcaaactggaagagcagaccttctaatctcaggtgctagtctgtcactgagctgcttctcatgtgggcagacctgtgcctctagagagaggggcaggaaggacttatgtttatgtaatgacagctaaagagtcccgttagcaacactgggaaggccagctcataaagtgacagtaacacagaggtttatgtgcctgagttcatggactccttgcatcagcgtggagggactggaacgtcttccccatttttactgacgggcccaaggtcgcagtgagaaagcgagaagtgaacgcgaacccaggtctatcagctccaggctcctaactgccgggccacttgacgtttcctcaggagtgacatgcggaccgcctgcaagctacacagcctgggtcggcccggggtgaccacccttcgggcttggcacactctgaggtggagcaggttggggaagagctggagctggggacacagccttgcccgtgggtgggcagggcctggtgggctcaggggcctcaccggctgctcaatgaccctcagcaccgtccgcttgatgtcggcgatggcttcagtgtacacggccgccagttcgtggatcagcttgtggttctgaggcaggagggccaggtagaggtacagacactgcttcactgtctcctccgtccagggtgctgccacctctgacagggcaggagcgggcatcagattggcccacactcttctccaaccccctcggaccctcaggaatgtcccttcttgggcagtggagccggggagggcagagaagggagccggggctggggagctaattgttctagggcagggaaatggcggggaccaggacttcccacctccagcctcccgtgactgccaacacacaaggcaactagaaggatctttctaaagtgcgatcctgaccctgtccctctctggctccaatcccagccatgcctgccctgtggcctcagaataaacccccagctccctgcctcacactgtctgccaggtgttgtatggggtggccccggcccgctgctgctctgctgccctccatgttggtcacatacccattctaacagtcccgagggccctggtctctttgcctttgcatccaccctcctctttgcctggtccacggcacctgctcagcttctgggcctcccgaaggctgtgcatctcctgggaatgcttcctggcacctgggccaggcctcccgtgctgccctatcatggcccaagccttcccatttaatggtccatttactcggggtctgagtctacctgtctgtaatccagggctctgctgagggaacctgcctgagatggccctgcctggtccttcctcaggccccaccgatggctggctctcctcgtcctccagatctctctccctgaccccccaggctgggccagatgccccctaccctgactcccacagcccccaggtggctgtcccagtcctgcccattcccgtcactcgtgtccgagtggcttccccactcatcccctctgctcgcagggcccagagcgcggacacagcagcgctcagtatgcatctgatgacctgtgcccaacctgtgtccttgtcagctccaaacagcacagacggtgggttggggtgcaccaggagctgcaggtagttgagggcaaatttctccacatactcccgcagctgctccttctcatacatgcgtttgatgaacagcagggcctgggagcgcacctgaggaggaagatggagaagggcagggtcagggaagaggtaagaggaagaacagctattcctgcgagcatggcaacactcacgtgaaaacaagcccgaggctgagaaggggcagcccagctgttaccagggcccagggctggtccccagtgcaggaggcagatatcctggccagggccggacccgcagcaccacctcactgcctgcctctccagcccatctgcccatcactgcttcttgccttgctcactaagctccaagcagagggagagctcctcagttccttaaaagtgccactccctgccaagtctccctagaacgtctactgccagctaaaccctgtttcactcagatatcatctgccaggagccgtgagggaagggtctggtcctgggcactctgaccccagcagcagcacatggccatggccagggccagggccaggggtgtgagatgaaggtctgctgaatgaatgaaaacgctacccagcaagggctggggcaaaaggctgcaggcaacgatgggtcaagggcgctctcaaccacagcacgtgcacatctgtcccctctgtctagagcacacccagctactgattttccaggtctcagcgtacaagtcccctccttgaaagaagccttccttgaaacacctcccctgcccaccccacaaccagatggtcggcccctccctccccagggcagccacacactgctctgctcagctgctgagcacgctgtgtcctcactgctggctgaggccacaccggctcccctgctgggctgggcaatgccctcaggccccggcacaggactgggctgcacgaggagcctgtgctggccaccacgggtggactaagagcgagagtgggactgcccttcccaggagggcaagcgcacgtgtgtgtgtgtacacactacaggcagactcaggcacggtaaccctggtttctaggcagcttgatgccactgaaaatgaaaataaaacagacagaaatagccaaaaaaccactgaaagaagggaatgggcccagagaaacttgcaagggagtgtggaagacgtgggctggttactcaggatagaggcggcctctgcaagctgcaggctgagggcagccaggaagtggaggaggggatcaccttgtccttctcatgggagctgaggtcgaggaggacatgcaggtactggaactggcgggacgggcgcttgaagatcaggtctcgaagtgtggacatgcccagataggtgcgactctgcagcaaaaggaaagggacccgagctcagcccacctgagtgtgcctctgggctctgtctttcctgcctgcctctgatcaggtacctggacaaaagggcccggtccctcacaaaacccccggccacaaggtttagactgtgtgcccttcagacccctcagggcagggccctgtcccctgccccgggctgcactgaccagggcctgtcctcacctcatcctcgcagtacttgcggaccacctccagggcactctctgtgatgagtggcgcctccagcacaaccttggtgaagatcctgccagagatggagggagggccatggctgcagaggaagaggccgcctggctcccgggccctgctgaattgtaggagctcagggccagcaggccctccctcaggggctgcttgttcaagcccctgcttataaagctttggaggtgaacagaacagggttcaaaagctggcggctggatgatctgggcagagactgcacctctctgaaactcatttcttccgtttgtcaaacagggattcctaactttattcactgaacataagaacgggagggaatgatggcgggtggagaagggtgtgggtattttagatatggtggcctcaaaaggccgctttgaagttacagttgagtacactggtggatgagaaggagccacccacacatagagttgagggaagagcattccaggtggacagaacaggaagcaccagcgccctgaatttgacatgttcgaggaacagacagaaggccaatgtggctaatgttcggggggtaaagccaaagagattgggtcacataaggcctcactggtcacagtaaggaggctgtgttttatcccaagaccaatggagaaccatggaaggttccttgtggggaagtaataaaaggatttatataataaaatgttcctggagctgctgtgtggaggatagacgagtaagctggaggccacggatagggaggaagctacagaaccaactcaggtagtgaatggggtgtagagaagtctatctccaggcccatgggtgagcactgttatttacagatgggaaaatggcagagagagggagtgacaaagccacgcagagcaagctcagagcaagtggcagagctgaggaacagctcagggagtgcgacctggagcccacatgcaaaactacaaccttgaacgtgcctccagagggggaggaggagaggagacttgggatgggtgcgaggaggactgactcggggggtgacgaagagggaggtggtcgcaatcagaaagggagggcagcaccaggagaggaagcctctcggggacaggagggtgcagggtcagccccctcacccatccttctggtctggtttctcctgcaggccagacaacaggcggatgaggcagtcctcatacttgtccagggagcccgaggcacctgcggccaggtaggcgttgtactcctggtagagccaggcgaaggccaggtccaggcgggcccgcacatcctccaggatgaaggacaggacctccgccttcaggcccgagttgaactgtgtcaccaggctggccaggatctttatgcggacctggtgggagggtgagccagcatgtcagtgtagggtgggcaatccagggactccgcaatcgtgccctgcgacttctcccacccagacgcaggaactctcagagcagacaaggagtgaagcgaggaaggccagccgaggacccttatgcctaggaaggtcccgtttgtgtgttggggggtgggggtaccagggtggggatcgatcatcacagaataaaaatgagtttctaggagcagcacccatgtacttaagtgcacagaaaaagatcctcaaagattcccctcatttgtgcctttgtcacctttgaagagagggatggggtgcaggtgatggccacggaagagtactggatctggattccccggaaatatttttcagctcagggagtatgttcctatactactggctaatcaacaattaacttcacagaatggggaaaaagtcacttttccccattctttgaaggtaacagtgccagcaagtggcagaatcaggacagagaaccaggtatatttctaaagctaaatagtaacagtaagaacgttaacaaccgtgaagaaccaagaccacaagagcagccctcacttgcagaggcctcccagcacctgccctgtgcacctgagtgcctgtgctcattgcacatttcctcctcgtcacccaggaggagctgctgctactgtctctgttttatggaggatgggagtgatctggagaagcggctgtgggcagcagagctggggtccgcagccagggaggtttgacgccagggccagactcttcgctggatgtgaggtagacgtttgggtagagggactggaaggatggggtggggggtggcaggcgcacacctgggctgccccgctgcaggccacagccttctcagcccgcaggatccgcttcacagcgcccagcttcatggcttccacctgggcatcggtaaggggcttcagcacgtcgctgagacggaaaattttcttgcgcccaccagcgcctgccagcctgtgtggaagagcagtgacagagatgcagtgacccagactgcagcaaaggcctgtctggtgactctcccaacttcaaggactaggtaggcaacagagatggcccccatccccctgctgcctctccagttcctctgtgtctctgaggcacggtgtggcggtgggtaagaggaaggaagaggatgttattttggttttgcagagggcgtcttacggaaggcttctgtgagtggggatctgaacggaggcagggacaagatacacaaatgtctgggggaccagctctccaggcaaaggcccttaggtgggaacagacttgtgggcacgagtggaggaggggtgagggtagcagaagagagctcggagggtagcagatcccgctcagctgtgttagtaagacttggggctgggcacggtggctcacgcctgtaatcccaacactttgggaggctgaggcaggcggatcacgaggtcaggagatcgagaccatcctggttaacacggtgaaaccccgtctctactaaaaatacaaaaaattagccaggcgtggtggcgggcgcctgtagtcccagctaatcgggaggctgaggcaggagaatggcatgaactcgggaggcggagcttgcagtgagctgagatcgcgccactgcactccagcctgggagacagagtgagactccgactcaaaaaaaaataataaataaataaataataaaaagacttgggtggccgggactggctggattttgtggtgtgtaagggaggtaataatggggacaatgatgatgacagccagtagcatttactacacaacaggaaccacgcgaaatgcttgacaatcacaatcacttttcactcgagtatctagttacctaaccatcaccattaccacgaactaatttaattcttctttgatccttatgagaaagatactatcattatcctaattttagacataaaaaaggattttttttttttttttttacaggaaagagaacagcaaaggcttagtggttatggcactgactcgggagtcagagagaacctattccagacttccttctgtctgcatctcagttacacacacacacgcacacgcacacgcacacgcacacgagctgagaaccagaccttcagggtagggctcctgtcctgccctagcacccagaagaggactcaccggggctgagtgacagggataatgggctctggcctcctcttggcctgcggtgcctcttcctccaggggggacatggagctcagggaacccaccaccgagatggcttggccctgggctgacaggcgccgcttgatcaggacgctctctgtcttcaccaccttctcctccttgggctcctccttgcactgtttggtctgctctacacctgagggggaggcagcaaacagacacccagtgcgtcagacccacctgctccaacccgaggacctcctgtgtgcctggctctgttctgagccctgtacacacaaaacctcgtttaaatccacacaacactgtcctggagtgggtactctttttatccccacttttcaatacaactgaggctcaaactagaaatgccattcattgctggggggagcagcaaatgctacagccactttggaaacatgatgagcagtttttgttttttagactgggtgtcactctgtcacccaggctggagtacggtggtgcaatcagggctcactgcagtcttgacctcctgggctcaagcaatcctcctgcctcagcctctcagcctcccaactagctgggactacaggcgcatgccaacatacctagctaatttttgtatttttttgtagagatgaggtctccatatgttgcccagcttagtcttgaactcctgggctcaagcgatcctcccgccttggacttccaaagtgctgggattacaggtatgagccactgtgcccagccctcagctgttttttttggagacggagtctcactccatcaccaaggctggagtgcagtggcttgatcctgactcgctgcagcctccacctcctgggtccaagccattttcccacctcagcttctggagtagctgggattatagacacccactgccacacccagctaatttttttgttttcagtagagacggggtttcaccacattggccaggctggtcttgaactgctgacctcaggtgatccacccgcctcagcctcccaaagtgctgggactacaggtgtgagccaccacacccagcctgtagcagtttttaatagcactgatcacaccctatgacccaacggttccactccttggtatatgctcaagacagatgacagcatgtgtacatgaagagagttggacacaaatattcacagcagctttattcccaatggccaaaaactggaaagaagccacaggtccatcaataccggtgtggataaacaaatgattgtatattcatatgacagaatactactgagcaataaaaaaccaactagtacctcacacgacaacaatgaagaatctcaaaaatgtacagcaggctgggcgtggtggctcacacctgtaatcccagcactttaacaggccgaggagagtggatcacctgaggtcaggagttcgagaccagcctggccaacatggtgaaaccccatctctactaaaaatacaaaaaaaaaaaaaaaaaaaatcagccaggcatggtggcacatgcctataatcccagctacttggaaggcaggagaatcacttgaacccaggaggcagaagttgcggtgagccgagatcatgccattgcactccagcctgggcgacagagtaggactccatctcaaaaaaaaaaaaaaaccgtgaaaaacaaaaaattagctgggaatggtggcagcgggtgcctgtaatctcaactactcgggaggctgatgcaggagaatcgcttgaatccaggagacagaggttgcagtaagccaagaaagttctgctgcactccagcctgggccacaagagcaaaactccatctcaaaaaaataaataaataaaaataaacaaacaaaaaaacacaaaaaaccatatggcaagccagagaaaccagactttgtgatcctatttagttttgttcaagaataggtaaaactagggccgggcgcggtggctcacacccgaaatcccaggactttcggaggccaagacggacagatcacaaggtcaggagatcaagaccaacctggctaacacggtgaaaccccgtctctactaaaaatacaataaaattagctgggcatggtgccgggcacctgtaattccagctactcaggaggctgaggcatgagaatggcgtgaacccaggaggtggagcttgcagtgagctgagatcgtgccattgcactgcactccagcctgggcaacagagtgagaatctgtctcaaaaaataaaaaataaaaaaataaagaataggtaaaactagtctatggaggcagaaatcagaacactggttttctctggagttcaatgccctgaggcatctctggaagaacaaggaggaaatttctacagtggcaatggtctataaatccgaaactttctgagtctcaacaaaacacaagggtaaaattccacacctgacctcgtgtggatagatggcagtcaaaacatcatttcatgaacaaaattattaagaaatattacaggtccagtgcggtggctcacgcctgtaatcccagcactttgggaagccaaggtgggcggatcacaaggtcaggagattgagaccatccttgctaacacggtgaaaccccgtctctactaaaaatacaaaaaactagggccgggtgcactggctcacacctgtaatcccagcactttgggaggccaaggcgggtggatcacaagatcaggaggtggagaccatcctggctaagacggtgaaacccccgtctctactaaaaatacaaaaaattagccgggcgtggtggcaggcgcctgtagtcccagctactcgggaggctgaggcaggagaatggcgtgaacccgagaagcggagcttgcagtgagccgagatcatgctattgcactccaacctgggtgacactgcaagactgtgtctcaaaaaacaaaacaaaacaaaagctagccaggcgtggtggcatgtgcctgtagtcccagctactcgggaggctgaggcaggagaatcatttgaacttgggaggcagaggttgcagtaagccgagattgcaccactgcactccagcctgggcaacagagcgagactttgtctcaaaaaaaaaaaaaaagaaaaagaaatatcgtatataattacctttgagctatgtttagctcattatgagctaaacataaatgaatttcatgtttagacttggatcccatccctaagatacctcattatgtatatgcaaatactccaaatccaaaggtctgaaatctgaaacacttctggtcccaagcattttggataagggatatttaacctgtatcttgatctgggtgatggttacactggtgtgttcactttgtgaaaattcactaaggtctataattaagagttctgcatttcacttatgtgtatcacacattaatagtactgttaaaacagggtaaaactatgaagctcagagaggttaactaacttgaccaaagtcatacagatattaagtggatgagatctgattcaactcaaacttcaaacccaggtctgttggattccaaagcccaggacttaaaaacactgagccatctatctgtggtacctgtcattatctacaccttagctcccacatgattttcaactgcaccacgagaagttgctcttccagtaaggagaacccagaagccacaagtgccaatccctggcccaggttagggccaggacacactcacctggtcccagtccggcagctgtcatctgtgtggccatgagccgagccaggtgcttgatctgggcttccgtgcctgctgactccacgggggtgtagatggcctggaaggaggctggcatggcctcgggtaggtacaccatgctgatgaggacctgtgggatgcccaggaagagagcctctccttaatcattaactcaagaagcattctttccatgcccatgccaatactggggaaatggcagtgcctaagaccgacttgggcctgctctcctggggcccagcctcttctggaagtcacagagaaaacaaataattatatagtgtagtgcttgagagggtaacatgaagggcactgtgagccacagcaggagccaggcaaggcaagggctccctgtgcaagaagcacctaggctgagaactgaggggagggcaggagtcagcataatacaggacaaggttttgaggtgggaggggtgtgtattccccgtagagaaacaccatgggagaaggctaagaagcagcagagctggcaccctgtccagagaacaaaagaggccaggtgcagtgggtcatgcctgcaatcccagcactttgagaggctaaggcaggtagatcacttgaggtcaggagcccaagaccagcctggccaacatggtgaaaccctgtctctactaaaaatacaaaaattagcctggcgcagcagcatgtgcctgtaatcccagctactcgggaggctgaggcaggataattgcttgaatccaggcggcagcagttgcagtgagccgagatcgcgctactgcactccagcctgggtgacagagcaagactccatctcattcataaagaaagaaagaaagaaagaaagaaagcaaaaagaggttcagtgaagagtgttaggactgggaattgacttcaaataacaagcaaacaagaaaccccccagaatcctaacagagaacatccatggatgtcaggaattagtaacaaaagataatttcctttttatttatttatttattttttgggacggaatctcactctgtcccccaggctggagtgcagtggcacgatctcagctcactgcaacctctgccgcctgggttcaagcaattctcctgcctcagcctcccaagtagcggggattacaggtgcctgccaccgcacctggctaatttttgtatgtttagtagagatggggtttcaccatcttgcccaggctggaaaaggataatttcaaacttcctatacatttgaagctttaaaaaaaatttatactgggcacggtggctcatgcctgtaatcatagcactttgggaggctgaggtgggcggatcacgaggtcaggagatcaagaccatcttggctaacacagcgaaacctcatctctactaaaaatacaaaaaacttagctgggcgtggtggcaggcacctgtagtcccagctactcgggaggctgaggcaggagaatggcgtgaacccgggaggcggagcttacagtgagctgagactgcgccactacactccagcctgggcaacagagcaagactctgtctcaaaaaaaaaatgtattatttttcttagagacagggtcttactctattgtccaggctggagtgcagtggcgccatcagagttcactacagcctcaaattcctgggcttaagcaatcctcctgcttcagcctctccagtggctgggatcacaggtacatgccaccatgcccggctaatttttttatttttctttttgtagagacagggtctcgctatgttgccaaggctacacagtgaactttaaatgcacacactaagtaataactaattagaacagaaagataatgaaactgctataaattaaaattgtggaatacagctaaaatagtactcagatggaaaatcaaatccttaaatgcttgcttacattggaaaagataactaaagattaatgagccaatcacttaaaaccgtgggaacaaacattcaaagaaagtagcaggaaagaaataaaggcaacagaaataaaacagaaaaagtgccaaaagaatatgaacaaaacaaagagctagttatttgagatgactgaaaacaagcaaatattttgcaagattggacatagtagtagcaacagaaaaggggcacattacaaacatatggtattttatactatgaatagcaggcatttttataaatgttgatgagcaacttcatggcaaaactgaaaaggtcaattcctagtgtgtgataagacaaaaggtagaatggccgggcatggtggctcatgcctgtaatcccagcactttgggaggccatggtgggcggatcaccagaggtcaggagttcagaccagcatgaccaacatggtgaaaccctgtctctgctaaaaacacaaaaattagctgggtgcagtggtgggcgctggtaatcccagctattcgggaggctgaggcaagagaatcacttgaacccgggaggcggagattacagtgagctgagatcgcgccactgcactccagtctgggtaacaaagcgagactctgcctcaaaaaaaaaaaaaaaaaaaaaagacaagttaacagaagccagatcaaagatggctgactaaggcaagtggaacttaaattttacttgaaggaagttggagccaggtagcaagtgagggttgggcttcaggtgaaaagggtgggcctggcccagggtaagtgctacaggggtggaaaagagggcaaggattagggagagaaggaaaagaggttcactcccaggtttctggtttgggaactgggaggggcctggagaggagcgtggggagaaagtggaaaagtgtagttctgccacatgagtctgaggtgctcctgggacgtccaaaaggaggatgatcagaagcgggttgcatacccaggcctgaggctcactgatgtagtctggatatttgttccttcccgaatctcatgttgaattacaatccccgatgtgggaggtggggcctggtcgggggtgtttggatcatgggggcagatccctcatggcttggtgctgtcttcaggatagcgagttgtcacaagatctggtcatttaaaagtgtgtggcacctccctgctccccaacactccctttctcctgctcctgctctgccacacgagatgcctgctcccccttcacctttcactatgattggaagcttcctgaggtttccccagaagctaagcagatgccagcaccacgcttcctatacagcctgcagaactgtaagccaattaaaccccttttctttattaattaggagggtactctggaggaggtggatggtgtgaagtggaggcaggtgaaagaccgaggagatccttccttcctgcccagggggaaaacgctccccacccatcctcaccagattagccacattatcaggcgtcagcagaggctgcaggaactcagctgtgatgtccgtgtctgactggccggagatctgcgctgaggccttcgaggtccccgacgggcctggctccaagtctttgtcctcatcgtcctcccccaggttgggctctgggatgagggaaaagaacaagatgctggctatagagagagctgcaggccctccatccttccggggtgcccgggtggtccctgcctctagtcagcctcagcaaacaggagcaaacagcggatgaagatccaggctgcagctctgcctctggtgccaaaccactttatgaccctgggcaactacctgactcgttctgaacctcagatctcctgatctgggaaatgggagtaagccacacccctgcagcttatcataagctctaagaagagattattattattactattttttgagacagtcttgctcgtcaccgaggctgcagtacaatggcatgatttcggctcattgtaacctccgcctcccaggttcaagtgattctcctgcctcagcctcccaagtaactgggattataggcatgcgccaccaggcccagctaatttttttgtatttttagtagagatggggtttcaccatgttggccaggctggtctcaaatttctgacctcaggtgatccacctgtctcagcctcccaaagtgctaggattacaggcatgagccaccacgcccagcctggtgcagttttttagaaggcactttggtaatggctatcaagaatgtacactcggtacctaagggcacacctgggctcagaccttgatttctgaaactattccccacttaaaggaaaccagggttccttaaaaagaaagactgattccagggctggggcaaggacagtacaagaggagtctagaacatcttgtcatgctagtaagtaagtgaaatgctcaaaacaaattcctgatagtaagtgggaagaagaagagaaagttcttccttacagcagaatgtcaactgataaatgtagaaggaaaatctctttggagccagtatagaataatagactcaggcaacaatcatcactggatgttaaaaccactgggtgaggctgggcgcagtggctcacacctgtaatcccagcactttgggatcatgaggtcaggagatcgagaccatactggctaacacggtgaaaccccgtctctactaaaaaaaatacaaaaaattagccgggcagatggcgggcacctgtagtcccagctactcgggaggctgaggcaggagaatggtgtgaacccaggaggcggagcttgcagtgagccaagattgcaccactgcactccagcctgggcaacagagcgagactctgtctcaaaacaaaacaaaacaaaacaaaaaaacacaaaaaaaccactgggtgaacgtttaaagagaaacatgtattttacatagtttcaaatatctcccccagcttattactgacaaagataaaaatggcacttgacactagagaaagctggttgaaactgtgttaaccaagcgttcaaaagttaatatctccaacaatgggacaccatgtgcctcctgatcccatgtactgaggcaaccaggggatcacctgaggcgggtggattacctgaggtcaggagtttgagaccagcctggccaacatggtgaaaccctggctctactaaaaatgcaaaaaaattggtcagatatgatggcgcgcaccagtagccccagctactcgggaggctgaggagggagaatctcttaaacctgggaggcggaggttgcagtgagccaagatcaggccactgtactccagcctgggtgacagagcgagactgtctcaaaaaaaaaaaaaaaaaaaaaaaaagacaaatttggtgggtaaaatataactttaaatatacaaaccctggccaggtgcagtggctcacgcctgtaatctcaacactttaggaggcgaaggcaggcagatcacttgaggtcaggagttcaagaccagcctgaccaacatggtgaagccccgtctctactaaaaagacaaaattagctgggcatggtggcacatgcctgtaatcccagctacttgggaggctgaggcaggagaattgcctgaatctgggaggcagagcttgtagtgagccaagatcccaccactgcactccagcctgggcaacaagagtgaaactccatctttaaaaaaaaaaaaacaaacaaatacaaaaattagcccggtgtggtggcattcgcctgtaattccagttactcaggaagcagaggtatgagaattgcttgaacccgggagacagaggctgcagtgagcccagattacaccactgcactccaatctgggcaacagagcaagactgtctcaaaaaaaaaaggatgaggtagatttctataaagaactccaagatgaaagtaaatgaaactaaatgaaaacaaggtacagaatactctgcttagtatacttaattatgaaaaaacatagtaagatccctacctcactccttagataaattccttttttttttttgagacggagtcttgctctgtcacccaggatggagtgcaatggtgcaatcttggctcactgcaaccactgcccccagttcaagcaattcttctgcctcagcctcccaagtagcagcaactacaggtgtgcaccaccacgcctggctaatttttgtatttttagtagagacagggtttcaccatgttagccaggctaatttcgaactcctgacctcaggtgatcccctcaacttggccttccaaaatgctgggattacaggcatgagccactgtgcctggcaattccccccccaccttttttttttttgagacagagtttcactcttgtcacccagactggagtgcaatggcatgatctcggcttactgcaacttctgcctcctgggttcaagtgattctcctgcctcagcctccagagtatctgggattacaggcatgcaccactacacccagctaatttttgtattattagtagagacggggtttttccatgttggccaggctggtgtcaaactcctaacctcaggtgattcacatgccttggcctcccaaagtgctgggattacaggcgtgagccactgcgcccagcctaattccttattttttaaaatgaaaaaataaatctttcgtaaatgctctagaaaaaaagtgtgatttaagaaaaaaatcttaaagttaagaaaagccatagttgacactattgataaataatacaaccactagaaaattacttcagaaagaaaattatctgataactaaaacaaaggaatgaaagaagagctccacactctacataaagcacttctggaggaaaacataaagaagtgttcacacctggggagtggttacttcttgggagagggataagagggatactattttcattttattcctttctgtaaaatttaaataatgcataatttattaaacgtatattttgataattctattgtaatttatatatcatattaaatactgtaatttatttttataattattttataattttttaaaattagagacagggttttgccatgttgcctaggttggtcttgaaccccggcctcaagtgatctgcccgcctcagcttcccaaagtgctgggaatacaggtgtgagccactgtgcctggcccacataacataatctataatataatcttagtaaatacaaattcagcatagtttaaggtaaataatgaaacatttcagcatggtctgcctgccccaccccaccagcccctctcacccagcttcatcttcttgagtgtggagtccgagtcatcgcggggccgcttgcgggtgtccttgctgctcggcatgttgcgggcgatctcggcctgaggtgtgcccaggtccaccagcagggtggtgatctgggcctggaactccaaggaagccgggtgcttcagcacactcaacaggtgcagcttcagattcttacgcacactgctcacctgcgatttggccagcgtcgggggcaggttggctgtgaggaaagtggcaggagctgtgtcttgtggaagatctcatggcatgctgccagtcttaattctcaaccccaaacttgggcagtggtcttgcaggcatctactagaaaagttccttcaccctcagatctaacgtgtggctttccgccttacaagctgatgcttcaaaccctgggggtctccatcagtatcagtcaatcttaaagagaaaaactcaccctctcttttagtaaatacatacaatttcgtcctcctccatctctggtctggaaattcacatatgcttcgcttggggagggttataatcaccacttttgcctccagaaacccccaactgaactgctgcaacagctcactgctagtctccctgacgccaggatgactttctaatggtcaccctgataagtgagcctcccctgttccacagtgaaaaaggatgcctgtaattctgcctgcctagcatccactgccccttcctcagccaacaacacaacccactctccgttaagggagaccccccttctccagtctccttccgagtgggcatgagacctggggccagtgagaataccacattcccttggccactgtaattggctcagagactggctcataatctctgctcagccaatcagaaacaatgaccgtcagcccttggacttctgctggaatggttgggaaggagacactctctttcccatggtgttgctaagtgaacggaatgggagccatgaactatggggggccatctttgctaccctaaggaaagggccagagagtgaaactaaaatggagaaacaaagagctgagagatggagaaatgcagatccacgacctgtacgcattcataccccaaccccagacttctcggttttcgtttcacaaaacagagaaaatggtatgagtctctgtgtacccatcaacatttcgctaatcttggaacatctatcctcccttttggtggggggagaggactggaatatttgaaagtatttcacagacatcatgtcatttcacccccacatacctcaatattaaagccagtcctgaatcaagtttctgtcacatgccaaaagattcctgtctaatgtagagaatctcaggcctgccagatggatgactagcgctcggggtccaccacggagctacatttctttaagaatgagcaggctgaggccgggtgcagtggctcacacctgtaatcccagcactttaggaggccgaggcaggcgaatcacaaggtcaagagatagagatcatcctggccaacacggtgaaaccccgtctctactaaaagtaaacaaattagctgggtgtggtggtgtgtcctgtaatcccagctactcgggaggctgaggcaggagaatcacttgaactggggaggcagaggttgcagtgagccaagattgcaccactgcactccagcctggtgacagagcgagactctgtctcaaaaaaaaaaaaaaaaaaaaaaaaaaaagaaagagcagactggccagtgaagagaaggcagggggaggggggaggacaatgacctaccatgcagagtttcataggcctggatcacctcagacatgaacatgggtctctggcgggcgatattggcaagggagcccagcgctgtggtcaggttgatggaggagatggcagggtgcaccatgaacttaagcagctgctccaaggctgccttgccctcttcccatagcacgtctaagagacagagaggagaaccagtcagtgggatccgttttcccaggcctctggagacagcagcttttgggactaaaaggaaggacagatcctggtacctagatgtctatgaatggcgggaaaaacagaaaatgtggtggttgattagttctatgagactattaatgagtataaaaatttagttataaggggctagacgcagtggctcatgcctgtaatcccagcactttgggaggccaaggcaggcagatcacttgaggtcaggagttcaagaccagcctggccaacatggtaaaaccccgtctctactaaaaatacaagaaattagcccaggtgtgaaggcctgtgcctgtaatcccagctacttgggaggctgaggcaggagaatcgcttgaacccaggaggcagaggttgcagtgagccgagatcgcgccactgcactccagcctgggtgacagagttggactccatattaaaaaaaaaaaaaatttagttataaagatgttcaaagcatgggcttgcaatagtgaaagactagaatacatgtgtatatacacacaactcaaagtcccttgtgacaccactcccctcaatacagtccccaaaattaatgcttaaaactttggtggatatctttccagacctttcctatacagaaacataacgaatgccatatatatgtttttaacttaaaaaattttaatgggtatatagtaggtgtaaataattatggggtacatgagattttgatacaggcatgcaatgcataattatcaccatcagggtaaatggggtctccatcacaagcatttatccgttttgttacacacaatccaattatactatttcaattattttaaaatgtatgattattttttagtatagttaccctgctgtgctatcaaatactggatctttttttttttccctgagatggggtctcactctgtcacccagagtggaaagcagtggcgtgatctcggctcactgcaacctccaccacccagactcaggtgatcctctcaactcagcctcctgagctgctgagaccacaggcacatgccaccatgcttggctatcaaatactagatcttatttgttctaactatttttttgtacccattaaccattcccacttcctccccaaccgcccattacccttttcagcctctggtaaccatcattctaccgtctgtctccatgagttcaattgttttcatttctagctctcacaaataagtgagaacatgcaaagttgtctttcggtgcctggcttatttcacttaatgacttccacttccatccatgttgttgcaaatgacaggatctccttcttttttatggctgaatagtattcaattgtgtatgagtaccacattttctttatctattactctgttgatgaatacttagtttgctccgaagtcttggctattctgactagtgctgcaatgaatatggaagtgcgggttatctttttgatacagtgatttcctttatttcggttacatatccagcagtgggattgctgaatcatatggtagctcaatttttaattttttgaggaacctcaaaactccaaacaatttttaggctgtagtaagtgacattctcaccaacagtgtacaagtgtttccctttctccacatcctcgccagcatttgttgtctttttgataaaagtcactttaactggggtgagacatttcattgtagttttgacttgaacgccacattatttaaaatagtgaattaggccgggcgcggtggctcacgcctgtaatcccagcactttgggaggccgaggtgggcagatcacgaggtcaggagatcaagaccatcctggctaacacagtgaaaccctgtctctactaaaaatacaaaaaattagccgggcgtggtggcgggcacctgtggtcccagctactcgggaggctgaggcaggagaatggcgtgaacacgggaggcggagcatgcagtgagccgagatagcgctactgcactccagcctgggtgaaagagcgagactccgtctcaaaaaataaaagtgaattaaaaatctaaatgaccatcaacagagcattgcttaatagaatgtaatgtaactatactatggaatatggtatagcaactatatgattctcacagggaaggacgtcactgatactattaagtcaaaaaggctgtcaaacaatacataagaatagttaatatttatggaatgtttactattccagccatattaatacaccaaatgctcatacctacatcctaaattagatgccataataacgatccccaatttaccaatgaggaatcaggctcagagacaagggaaaataggctgtgtgtcagacacaagctactataatgtctctgagatgaaaacacaaagcatggcctcatttttgcaaacagaaaagcaaacaaatgcagacactatgcatatacacatacaaatacctacatgtgcacaggaaagatctgaaaggaaacataatactcttaacagtgtttatctctggaaagcaggactgagggaggggacattattccttttgattcacccatattgcttgacaccaagtgtatatatagtactttttttttttttgagacagtctcattctgtcacccaggctggagtgcagtggcacagtctcagctcactgcaacctctgcctcctgggttcaagcgattctcgtgcctcagcctcccaagtagctgggattacaggtgcccgccaccatgcccggctaatttttgtattttcagtagataaggggtttcaccatgttggccagggtggtctcgaactcctgaccccaagtgatctgcctgccttggcctctcaaaatgctgggactataagcatgagccaccacacctggcctatgtcctacttttataatttgcagttaagaaaactgtaaaactgcccggcgcggtggctcaagcccgtaatcccagcactttgggaggccaaggcgggcggatcacaaggtcaggagttcgataccagcttggccaatatggtgaaaccctgcttctactaaaaataatttttaaaaaaattggccaggtatggtggcgggagcctgtagccccagctactttggaggctgaggcagaagaatctcttgaacccggaaggcggaggttgcagtgagctgagattgtgccattgcactccagcctgggcgacagaggaagactccatctcaaaaaaaaaaaaaagaaaaccataaaactagctagcatcgactggctcacactcatggaacttcactacaaacctgtgagagtggtactatgttatcgtctccaatttacaaaaaagaaaatgaagtacagagacaggtaacttgcccaagttcatgatgagtaagcagtgcagctgggatctgaacctagcaccagggatcttaactactgcacacactgttccagaaatttaaaaccaaaaaagacaagggggagagagggaggggcgtgaaggagaggaaactggtgcagggctgtcaggggtggcagctgaaggcagtactcactgtactggatgtaggggtggtcacgagggatgcggtccaggctgatatcatgctcctggcgtcggggtatctctgagtcagccatgcggggtgacagggtgacaatgaggccctccacaaacttgatggcgtgggtgcggatgccgtcattgtcagagtccaatagcaggatgatgtcccccgccatggcagataccatgtcccagcaggcctcctgtagctcgctaatgacccgtgactttaccatccactgccagcaggccaggaaggaatggaagagacacacaaagaggtgaagacaacgcatcaatcaccaacaccctctgccaatacccagagaaccatgaatgatgaatacattcatttggttaacagttactgagttccaactctgccccagcccagtgctcggtgatgctggagacaggactgagtagtggccaggcctcgccctgccctcatggggatgcagagagtgaccactcagtgtgatgaaggcacacatcttcagggtaaaggactaacagtgctgacttcacaaggtggtggtgattaaatggattcattcgttttattaatgctaatgtacatcacaccatagagtgttcttttcctatcacactccataatcaatatttatgtgattcattaattaaggtctacctccctccttgggttatgagcactgtgaaggcagtaagctgtcttggtcactgctgtgtccccagcatcacctagcccagggctaagcacagaggacatactcagggaatgtctgttgagtgaataaacggatggtcaatggaaggaatgaaggttaagtgcaacttcctgacctaggagacaacgttagctctccatgttatctgttcccacagaccagtggcacatcttgcccataaagagtatgctcggatgctggttttgaaccccaacatattagtttgtcaacgagacatatcaggcaggatggccctgggtggggagggcgctctcacctgcagggccaccttgtagagctgggtcatggtgaggatagccttcttcaccacgttcacattctcgtccctcaagagcatgttgaggtttgcaatgagtttcagcagcaactcaatgtctcgcttgctgagggatggagaaaaaaggggcgaggtcaaggtgtggtcttagagcaagtaggaggagcctgaggtccaggagggaagggaaatcagggacctgtctcaggggaccggaatggcacatccagaagctgggaacagtgcttggtgcctccagactgagccgcccctgaaccctctatctagactggtcctgtaacaccaactcctttgctctctcagggccctgctgttcacataagggacagtaggggcagacaactgtgtgaatttggacaagcgacttcacctcatttagaataatagtatctatccaattgtttatgcaattttttgggaaaattgcaacaatacttgtaaagtgcttagaagagtgcctgacatgcagaaagcattcagtaaacaccaaaaagcattcggtaaacaccagccattgctactttaaagcactttgttttctgtaatcactagttttgcttgcctcagtctgagggctcaaaaagtagggaccctttcctagcttggcaataaccccagcagggtcattttcattgaagaaaaaaatgaagggcctccaacaaatgttcaatgaataaataggagctcagcacagaattttcacagcatacattacaatctgaaatattaattaaatcagtcaaaaaatatgaaacttagctgtcagctacatgaaggcaggaataatacgtttttgctcactgctatactacagcctaacatggatgcctggtacgacagcagtcacatggtatgtatttgctgaatggactttttacaaattcagaaaatttaccacaaattctcccagtaaatggggagataggatatttgggttctggcattgcagacatgagttaaaatcccagccttggccaggcgcagtggctcacgcctgtaatcccagcactttgggaggctgaggcaggtgggtcacctgaggtcaggagtttgagaccagcttgaccaacgtggtgaaaccccatctctactaaaaatacaaaattggccgggcatggtggcgggcacctgtaactccagctacttgggaggctgaggcaggagaatcacttgaacctgtgtggtggaggttgcagttagccgagatcgcaccattgcactccagcctgggcaacaagagcgaaactccatctcaaaacaaaaacaaaaacaaaaacaaaaaaaaacaacaacagaaaacaaaattagctgggtgtggtggcaggcacctgtaatcccagatactcgggggggctgagggaggacaatcacttgactcaggaggcagaggttgtagtcagccgagattgcaccactgcaccccagtctggccgacagagtgagattccatctcaaaaaaataataaataaataaaatcccagccttgccacattctggctgtgtgaccttaagaaaattcacttcacctctctgagactgttttctcttcagttaaagggtcaaacaactgatccatagtattacgaataatgaagctgctcaagcatttaatacagtgccttacaaacaaatatttaatacacagtagctagtctacttcctcccagtcacaaagcatccagtaaagctttaataaacaaatgagcaagtgaccagcttgaacaagtcacttgaccattctgagcctgtttccctttctgtaaaaagaggataaccacagtatccatcgaggctgccataattacggagataacacgggaaaggacctgacacagcgcagggcacagtacgtgttccatgtggtgactgttatgttcaactcattcacgtgtgcaacaaatacgtagtcagcccctactaggtgacaacactgctccaggcaggtactggggacaaagtggccagcaagacagaaaaagtcaagccccgtcctcacagagctgatattttgcgggaagaatcaaggttatttcaatgagtgaggaacactgtaaagaacagtgaaggtggggtgcctgagacatggggctgcatgggagcgggcaggaaggaatttctgaggaagagacctgagggaagggaggggagagccaggtggcaacctggggacgagggcccctagcaggaacagcaagcagacaggctgcgaaatccaactgtgacttctgaggagcaggggagacagagaggatcagaagtgagatgaagccgaagtgagagtttgggtttccacctaagtaagctgatgagccagctggggtctgagagcaggggtgtgccaagactgatttacatttaacagcgtcactctggctgctgagtgcaagagtggaagcgggaaatgagtgcggtgattcctctttgggggatgaaatgccctggaacgagattgtgaacgtgctaaatgccactcacttgttcactttaaaatagctgatttttgctgggcgtcgtggctcatgcctgtaatccccgcactttgggaggccaaggtgggccaatcacttgaggtcaggagttcaagactggcctggccaacatggcagaaaccccatctctactaaaaatacaaaaattagccaggcatggtggcacgcacctgtaatcccagctattcaaggaggctgaggcacaagaatctcttgagcctgggaggtggaggttgtaatgagccaagattgcgccactgtactccagcctggacaacagagcaaaactcagtctcaaaaaaaaaaaaaaggccaggcacagtgactcacacctgtaatcccaacactttgggaggccaaggcgggcagatcacctgaggtcaggagtttgagaccagcctggccaacattgcaaaaccccttctctactaaaaatacaaaaataagccggatgtggtggcgcatgcctgtaatcccagctacttgggaggctgaggcaggagaatagcttgaacccggaagtcggaggttgcagtgagccgagattgcgccactgcactcaagcctggacaacagttgagcgagactccgtctcaaaacaaacaaacaaacaaaagattaaaaaaaaaagctaattttgttatatgaatttcaatttaactaaaaagaaaaagaagggagccagagagagaccactgaagtcatcaggtaggaggaaagggtggcttgggcctgcatagtggcagaggaagtgattgacaaacggtcagatgctacagatattctcaaagtggagcccacagtccttagtgataatgtagatgtgaagtgtggaagaagcagaggaatcacagatgaccccagggtttccatcttattaagtatttgctggggaatcagtgtgtatgagagagagaaagggtctgggaagcagagggcaggcctctcagtggtggcctccaggccaggccacgagctgaaggctgccaccagtgagaatgctcccggggctccgtgcctcgccccataccatgcctcctcgatgaagccgatgacaaattttcgcacttcgattgacttgtctgcttggaatgcgatgatctcctgccaatgttagagagaaagtggatcagggctacacaaggatccacatcccctttcccctacaccacacccctttctcttctgtcagtcactcacatccaggaagttgtccagtagtgtggggtctttgttgatgatcagctcctggacctggaaggagattgggggtggggaggaggaatacccatataaaacgaggggccaatcaatgcagacaggagagtagaggggaagacagcagagggctaggcagcagatacactcatttcaatgcctggctctgcttctccctaccaagggtgctatgctctgggcatggtctctgaacctcagtttgctcttctataaaatgagactcttaaacatcaactcaaaagggatgttaggaggctacaatgagatcctacaaggcacaggtcctggtagatagtgaggacatgacacaggagggggctgaaaaaaagaggaaagtgccccaaggctcaggccttcctgaggtttggcctccattcacctgtccatcagttctccccactctccttctgcttctgctccctacttcacattgccatgattcagcaaacatcttcacagtgagaacccaattcctgaagcccttgtgcctgccaggctctttggagtaagcccttcccatggacatcctccaataagcaaagagctggcacaggacctggctgctacaactcaagctactattgctaaacggcctcatgaccacccatgggggaggcaccaggtgcatccactccacctcggaggtggggctactccacaaggctacaggctgatgaaggagccgaacgggttctcacacaggaatgctaaccctgccagtctctgaactccaactgcctcctgctctgaaccatgcccagcccaagtgtcccatgtcgtcttctgcctttgcacacacttctgtgccctcagcttgacatgctctccctctcttggctgggcacggtggctcgtgcctgtaatcccagcagtttgcgggggccaaggagggtggaccacttgagctcacgagtttgagaccagcctggtcaacatggtgaaacgcgtctctactaaaaatacaaaaattagccaggcatggtggcaggtgcctgtaatctcagctactcaagaggctgaggcaggagttgcagtgagagccaggatcgtgccatggcactccagcctgggcaacagagcaagactctgcctcaaaaaaaaaaaaaaaagagatgctctgcctctctcatttggtacacttctctccttttatcctccatggcttggttcaaaagtcctccctgactccccatccctaggctgggtcaggagctccctctgggctcccagagcccccctgggctcccttctccatcccagccctgcccacactgggtcatcattgcctggtgacaggaatgtctgccccactggactggacactggcagagaagaaatgcaatgatgaagagtgtaggatttggagctggaatccaggattcaattactagttcagccagctcccagcagagtgaccctgggctaataatttaagccccggggtctgcttctttctgtataaaacagggatgaaactaccctgccttacagagctttcatgagaactagaagagcagaggcctgcactgagcactgtggccggcacacactgagtgtgtaaatgtggacactggtgttactgcaagtgtctttctcaggttcccagcctcctccctttcacctgctcagcccaggatgccccccgggccctcacctgtttgagcactgtgatctttgagtcattggtgatcagcgccgcctggttcagaagatccaccacctggaaggagggggagtggcaggggatagtgccagcccagtccagcccagtgcagccccctcggcactcccagggctctgccacctaaacagggattgccaaagccaggggctatgcttcctcactccaagccctacccgccacgctcaccctctctgaggtggtcatgccatcgatgcccggcccctcctcttgagtgaaaaactgtgatgccacgctccgacgggtgacgctgtctccactgccgctcgccatggctgctgtcagcttgtccccaggaaagaagaggatggatcaagctcagggaaccagcggatgggctgggctggattgtcacccgaacacctacaaagggcccaagcctccttcccaggctgttcctccccagtcaggccttctcaagtccctctcccctccagggtctgtctctggcttatggatatgtgcacggggcctgtaacttgggggagactgacatctcccaaggcagagccagaagtctcagcctcaagtgggccaaccacaaacagctgctgaacgatgggccacatgaacgtgcaacagccaccttgcaggtctccgtgtgtcccctctctccatctgggatatgctttggactgggcaccacagcaaactttcttttttttttttttttgagatgaagtcttgctctgtcacccaggttggagtgtggtggtgcgatctcagctcactgcaacctctgcctcccaggttcaagtgattctcctgcctcagcctcccaagtaactgggattacgggcacatgccaccatgcccagctaatttttgtattttcagtagagacagggtttcaccatgttggccaggctggtgtcaaactcctgacctcaggtgttccacctgcctcggcctcccaaagtgcagggattacaggcgtgaaccacagtgcctggcccagagtaaacttttaaaaacacagctctgaggaatatcaggcacagagtccggcacatagtaggcactcaatacatcacaaaaggcctgcttcaataattatgtttcagccactctctggaatatcatgaagctgtttttaaaagggaggaagggggctttcaggcatccatcacagtcacacaggcaaaattatggaatgattaacgtagcagtatatgtcaattacacaactattcataatagcaaaagactagaagcaactcaagtgttctcaaatagggagactggctgaaaaaaagttcatacataatcaaaggccatggggcttcaacacctgtgaaagtaagtgaaaaacatataaatataaataaaggaaaaagactatggaactgtaacaagaaaggaagaaaaaaacaaaaaaatgagaacaatctctagacactgatagagagtgcatacattaagtgaaaacaagcaaagctgaagacagtgttgactgtatgtttctgttttacaaaaaaaaaagaaaaatgaggccaggtgcagtggctcatgcctgtactcccaacactttgggaggctgaggcaggcagatcgcttgagcctaggagtcggagagcagcctgggcaacatggtgtaaccctatctctacagaaaatataaaaattagctgggcatggtggcgtgcctggtagtcccagctactcagggaggtgaaggcagaggctgtagtgagccaagatcgggccactgccctccagcctgggcagcagagtgagaacttgactcaaaaaaaagaaaggggaaaaaatatatatgttaaaaaaggaaaaaaatctgaaaggataaaccaaaaaccagcagaggaaacagggtaaaaaaaattggtgaagccgggcgcggtggctcacgcctgtaatcccaacactttgggaggccgaaacgggtggatcgtctgaggttaggagtttgagaccagcctggccaacatggtgaaaccccatctctagtaaaaatacaacagttagctgagcctataatcccagctactcaggaggctgaggcagaagaatcgcttgaacccaggaggcggaggttgcagtgagccgagatcatgccactgcactccagtctgggacataaagacagactccatctcaaaaaaaaaaggtgaatctcagtatattatcctgaaaagaggtccctgacagcctgttgcatcagaggacaatacatgcagttcaagccatttttgtcaagtatgtgtttatgtatacgcagaatgacctgaggcaagacatttaacttctctggctctcagtttcctcttctaggaaacagggatagtaacagggcttacctcccaagactattttgaggattaaatgagttagtatatacagtaaacattggctaagtatactattatttttatgtacatgggaaaagatctgaaggctactgcataaactgctaacaacaattatgataattaataataatttggccagctcacgcctgtaatcccaggattttgggaggctaaggtgggaggatcaattgagctcaggaggtggaggatgcagtgagctgtgatccctaccactgcattccagcctgcggacagagcaacaccctgtctcagaaacaaacaggccaggtgcagtggctcacatctgtaatcccagcaccttgggaggctgaggtaggcagaacacctgaggtcaggagttcgagaccagactggccaacatggagaaacactgttccctactaaaaacatacaaattagacaggcatggtggcgcatacctataatcccacctacttgggaggctgaggtgggagaatcacttgaacctgggaggcagaggctgcagtgagctgagatcacgccactgcactccagcctggacgagaatgagactgtcttaaaaacaaaacaaggctgggtgcggtggctcacacgtgtaatcccagcactttgggaggccaaggcggacggatcacggaggtcaggagatcgagaccatcctggctaacaaggtgaaaccccgtctcttctaaaaatacaaaaaaatatgccgggcatggtggcgggcgcctgtattcccagctactcgggaggctgaggcaggagaatggcatgaacccgggaagcggaacttgcagtgagctgagatcacaacactgtactcgagcctgggcgacagagtgagactctgtctcaaaaaaaaaaaaaaaaaaaaaaaaacacacactaaacaaacaaacatgccaaaaaaacaataatctgaggacggtgaaaatgatacttttttctttttttgagatggagtcttgcactgtcgcccaggctggagtgcagtggcgtgatcgtggctcactgcaagctccgcctcctgggttcacaccattctcctgcctcagcctccccagtagctgggactacaggcgcctgccaccacgcccggctaattttttgtatttttagtagagacggggtttcaccatgttagccaggatggtctcgatctcctgacctcgtgatccgcccgccttggcctcccaaagtgctgggattacaggcgtgagccaccgcaaccagccgaaaatacttttttttttttttttttagatggaatttcactcttgtttcccaggctggagtgtaatggcacaatctcagctcaccgcaacctccaccctcccaggttcaagcaattctcctgcctcatctcccaagtagctgggattacaggtatgtgccaccacatccagctaatttttgtatttttagtagagacgaagttttaccatgttggtcaggctggtctcgaactcctgacctcaggtgatctgcccaccttggcctcccaaattgctgggattacaggtgtgagccacagcgcccagccgaaaatgacacgttttttaaaaggaactacccaatagctattcacagtagtatcacatgataggggtctcctcaatgaatgacgagccacagcctcctccctagtttccctgctgcctgtcaccccctatcttgctcagggtcagggccaatgtccccatcaaggcctacaagattttatggcatctggcctgttcttcctctgactgcctctccccctgggctctttgctccacccactctggcctcctcgctgtcctgtgaacatgcccaacatgccccttcctcaaagactttgtgcctctcttccgtctgcctggaatattcctcctcctagatatcagcacaactccttccctcttcatttccttcaggtctccactcacatgtctctgcagtaaggtcttccctgacgactatgtttcttttttttttgagacggagtttccctcttattgcccaggctggagtgcaatggcgtgatctcagctcacagcaacctctgcctcccaagttcaagcgattctcctgcctcagcctccctagtagctgggattacaggcatgtgccaccacgcctggctaattttgtatttttagtagagacggggtttctccatgttggtcaggctgatctcgaactcccgacctcaggtgattcgcccgccttggcctcccaaagtgctgggattacaggcatgagccaccgcgcccggccgacgaccatatttcaaattttaacttcctctcgatccccatctgtgttgctttttctccatagcatttatcatcatcacacactacatatttataagttccacgaggacagtgatttatttatttgaaatcattttttggtagaagcagagtttcgccatgttgcccaggctggtcttgaactcctgcactcaagcaatccaccctccttggcctcccaaagtgcttgggatcacaagtctcagccatcgcccccggcctagaacagggattttgttccttcactttttatattcccagcacggaagagtgcttggcacctagcaggagctcaataaacatctgctgaatgagtgaacactactgccaaacggcctccccaatcactgggttcagtattcctgccctttcactcttgaatcctaatagctatacttgttctactttttccccctttctcactactgcacttgacaagtctttaaaaaaaaaaaaaaaaaagggcatggtgtggtggctcactcctgtaatcccagcactttgggaggccaaagtggacagatcacttgaggccaggagttcaagaccagcctggccaacatggcaaaacccagtctctgctaaaaatacaaaaaaattacttgggcatggagatggatgcctgtaatcccagctacttgggaggctgaggcatgagaattacctgagcctgggaggcagacgttgcagcgagccgagattgcgccactgcactccagcctggatgacagagcaagactctgtctcaaaaataaaacaaaacaaaaacaaagaaaggaaagaaaacaaaaataggacgggtatagtggctcacaattgtaaacccagcattttggtaggtctaggtgggaggatggcttgaggccaggagttcaggactagcctaggcctaaaaactaaaaaagaaggccaggtgcaggggttcatgcctataatcccaacattttgggaggctgaagcaggaagagtacttgaggccaggagtttgaaaccagcctgggcaacacagcgacacaccatctctagacatatgcacaattagctgggcatcgatatcatgccactgctctccagcctgggagacacggtaagactccatctaaaaaaaaaaaaaaaaaaaaaaaaaaattagccaggcatggtgccatgaacctttagtcccagctactctggaggctaaggtgggaggattgtttgagcctggttgtagtgaagtatgattgggccaccgtagtccaacctgggcaacagagcatgaacctgatgaacctgtttccaaaaaaaaaaaagaaaaaataatcagttaatatatattgaacacggccgggcacggtggctcaagcctataatgccagcactttgggaggccaaggcgggtggatcacccgaggttagcagtttgagaccagtctggccaacatggtgaaacctcatctctactaaaaatacaaaaaaattagccaggcatggtggcaggcacatgtaatcctagctactcgggaggctgaggcaggagaatcgcttgaatttgggaggaggaggttgcagtgagccgaggtcacatcattgcactccagcgtgggcaacaagagtgaaactgcgtttcaaattaaaaaaaaaaagaaaaaaaacccacacacacagagagagaaagagaaagagagagagagaacacttaatatgtgctaagcacaattctaagatatacatattaactcatttaaacctcagacaccaaggtttaaatgaattaatatgtatatattagaattaatatacatgagttaggtttacattttttgtttttttgagacagggtgtcactctgttgcccaagctggagtgcagtgccgcaatctcagctcaccgcaatctctgcctcccgggctcaggcgatcctcctacctcattttcccaagtagctgagactacaggcgaatccccatttaatttttgtactttctgtagagaagggtttcgccatgttgcccaggctgggagttagtatttttaattttcattttacagatgaggaaactgaagaccagggaggtaaagtgacctgaccaaaggcatatagcttgtaagaggcagagtcagcagcatggctgcatatcttccttaccactatgctacagtactgtttatctgaaaggaattgttttttacccccaggtctgtttacgtaagccaaggatcctggccaccagacaaccggcatggcatgccgtccccagtcaaaacataaaaaaaacaggccgggcatggtggctcacacctgtaatcccaacaccactgcactccagcctgggcgacagaatgagactctgcctcaaaaaataaaataaaataaaataaaaccccataataaacatttccacttttttcatgataatacattcagatcaaccaaaatattttaccctgtttcattcttcttctgctttttggtttatgctttcagttttgttttgttcttttttaaacacacatacacaaaattctcctgcaggagctagattttatgcaaaaaaaggaaaaaaaatgaaaataaaaaaacccatatatacatatttccctttcatttacaaaaagagcatacacagggccgggagcggtgactcacgcctgtaatcccagcacttcgggaggcggaggcaggtggatcacgaggtcaggagttcaagaccagcctgaccaacatggtgaaaccccatctctactaaaaatacaaaaattagccaggcgtggtggtgtgcctgtaatcccagctacctgggaggctgaggcaggcgaattgcttgaacctggaaggcagaggttgcagtgagccgagatcacgccactgcactccagcctgggtgacagagtgagactctgtctcaaaaaaaaaaaaaaggagcctacacaggccgagtttggtggctcaggcctgtaatccctgcactttggaaggctgaggtgggcagatcacttgaggtcaggagttcaagaccagcctggccaacacagagaaaccccgtctctactaaaaatataaaaattacctgggtgtggtggggcacgtttgtaatcccagctactcgagaggctggggtgggagaatcacttgaaccagggaggtggaggttgcagtgaactgggatcgtgccagcctgggcgacagagtgagaccctgtctcaaaaaaaaaaaaaaagaaaaagcatatacaataaacaccaacctccacttcacttgttttcccttaatatatgttggaggccactatatcagtgtatagagattttcatcatttccttttatctacctcattcctttttagagttgcatagtattttttatgtggatgtattatagtttctttcagccaatcttcttatttaagaacatttgggatgcgtgtagccttttgctatgatgaacagtatcactgtttccccttccctctcgatgtactcgttaagaagtggtaccctgccccactgctacctaggaatctgatgactaccctgtttccccaaactggctctaggagtatcttttattccttcaacgaacattagctgggcgtctccggcgtgattggcgctgtgctgagaacacagtggcgacagagacaaacctagtccctaccttcatggaacacacggtcatagacatcataaaacagcacacagataagagtcggataacaaattagaccacacgtgacatgaaggaacacggaccgacaaaagcatttaacaggcggatttctggatggagggcagggaaggagggcttcgcagaggaagtgacgttggtgccgagacccgaaggatgaaatgggagttagccaagccgaatgggtaaaaggatgttgcaggcagaagggacagcctgtgcaaaatccccgaagcgggaaagcgcatggcaagtttaaggaaccgaaaggccagggcggctgttagaggtgggggaaaaagcaaagaggccgagtcgaagcaagcgaggtctgcggggcggtggcgcccggggggccacgttggaactttgcctcgagggcactagggagccaaggaagggtcctgagcaagggaagaaacatgggtcgcgaaagccactgttcccctctccccacggcgatgccctccccgcccgagcccctgcttctttaggagcctcctcctttcgtctccgggcccaaacgccgcctcccgctcaccgcagctctggcctccgttcccctcgcgccccctcagcagtgcctcttcctacactccgccgccgccgccgccgccatcttccgttcgtcgccgggaacggtgcgcacgcgccacacacccagggccgccgggaaatggagtccagagcacagcccgaccccgcccatgcctcgtcccgtgcgagcggcattctgcccgcctccatactacggcgagcagacccttcatttccggctctgggtccggctaggccttctgggaaatgtagtcccttcggaggcaccgggcggaaagggagctagagcattctgggaaatggagttctcagtggtgctgagtccctggacggctggctggtcttggagagtgcggagttcgggcagcgaagctcctgggtcttggaggggaggtggtctgttgccctagtggggtctgcggagaggccccgatcccctccatctttgttcttgaccctttcaacagtctgaagcatttctttttcttttcttttctttctttctttttttttggaaacggagtcccgctctctctcccaggctggactgcagtggcgcgatctcggctcactgcaacctccgcttcctaggttcaaacgattctcctgcctcagcctcccgaatagctgggataacaggcacgcaccatcacgcctagctagttgttgtatttttaatagagatggggtttcaccctgttggccaggctggtctcaaactcctgacctcaagtgattcgtccgcccgcctcggcctcctgcagtgctggaattacaggcgtgagccaccgcgcccggccaagttaagcatttctagccgtcggaagcctcagtcttcctgtctgtccaatggggatgtgatttcggggaccttttacgggtccttgtagtcgcatagtggccctagcgttctgattcccctttcttccgccacggtcatgcagggctctggctcttcgtcctctcctgccgagatgatgaagccccctgaggtagaaaggctccagagttctgacctcggggcccttggtatctgcagcgtcgctgcgggcagctccctcactcctgaatcacccccagctgtcgcgtcctggggctgcggcccccggcgcctgaggtctgtctcctggcgatcccgcagggggcgccccagtccgagcgcgccgccctcggggaggcgggaggggagcccggggcgggcgagggcgggggtgtcccggctataaagcgtggccgcctcccgcggcgctcgggacagccgtaccccgggcggtcggacgggcgggcgccggtgggagctcgggccgtgcccgctgagagatccagagcgctccgttcccccggggccggagcgggggcgggtgggggcgtaagcccgggggatgctgggctcagtgaagatggaggcccatgacctggccgagtggagctactacccggaggcgggcgaggtgtgtcctcggggatggcggagcgggaagttgggggcaggtatcggggtgtgggctcacatggagcagggactggttgtgggttcaaatggaggcaaaggcgtctacttgggcagctgaggaactgggaacacggagaccaggtgtggaagtcggggaccggggacgaggcatggatgggagcgctgtttgggcagcctcgccgcggccagggcttaaaaatggaagtcaggaaaatttagccaagggtcgggtcacaccttaaacttgggagccgggtgttggagccccaaaaagcaagggatttatatgtacaaaccaaagataggaatcagagttccagggtaggggacagactagggggtttcaggatgtgaggttcaaagttggagggaaagaaagactaaaagatggaggaggagtcaccattaaggggaagactgaggtgggagctcagggccagcacacagtgttaaagaaccggggttcggggctaaggatcagctggtaatctaaggtagggtcagacatagggattggtgctcaggggtcagagatgggggtgctcagagatgaagcttcgtttttggagtctgaaataacaggtggcttagagttgggcatctgggagcagaagatgtagccatcagcattggcaggagaggggccgatctccacccccccatccctacccatgaccctccgcagggactccccaagtcggaagatggagagttttagattgtgcaccttcccctgctccccgccagtccagcaacctccagctattgctaaaattcccatccagtctcacctcagacaaggcttccctggagtggggggtggcggcatattctaatcccctcacctggacagacagaaagtccttcctcaagtctgacccccattcgtcttgctgcaacgacccctacaccttagctacctcactctgtaatcaacgttgtgaggttgttggggctgggggttgggttcttggtctgagaattatgggggtctggacacttggacttctaacctggaaggggactgtgggcttgaggtggggtgtggggcaggaatggctaggttctccaaggagtcaagatctggtgactgcgggggccccagtgtgcctgagtcttgggtctggggctcgaaactgtagggtgggactcctggatccccaggccttcagggctgggcaaggtgcctgggaagggccagtcctgggtttggggaggtgtgaggtgcacgtggggtggggcagggccaacagggaaagggactgggagtgttgagaggtggaggcagggtggctggaggtatcagttgtgagatgcggaaggcagagacccaggtgggaaatggagggttccaggtagtgggggtgatcccagctggacctctgcagaactcagtctggggacctgatttaagggaaccacctacagaccaattgtacaaaccaactacagttgttttgggggcacatcttaagtaaatgatgggggtctaggcaggaggagttgatatttggggcacagtctgaatagatccaagtttaggggacaatttgtatggaaattgtgtcagaaattgaaggaaagccggcacagtggctcacacttgtaatcccagcactttgggaggtcgaagtgggaggatctcttgagcccaggagtttgaggccagcctgggcaacatagggagaccttgtctttaaaaaaaaaatttttttttaattagtcaggcatgcctgtagtctaagctacttggttgggaggctgaggtgggaggatcacttgaggctgggagttcgagctgccgggagctgtgatcgtatcacggcactccagcctgggtgacagaatgagaccctatctcaaaaaataataatagtagagggacagtctggaggtaatcagcatttcagggcatattttgggagagtcagtatttggaggaatggaaatggttgggtgatactgtctgaggctctccccagccttcccatcagataagcccacctcttccccttgggtcagaacaatggggagagaaatacctacactcagccagcaactgagagctgagagggtccccaaaccacttcttgcccatagcaccctcccgcttggggtgacgttaacactcagggcagcttgctgtctggaaagaacttggaaagttaccatcctgggatatccctgttggcctcaggttcttgcagatcagctggtccagctgctcccctgttttagaggtggttaactctgaagccccgcacgcagaacactggggtcctgggttgggtctgggactagaaacttggcttctggcttcacactgccttcctctgctccctgtcacacccttctccagagacaataaggaaatgaaagaggagaaattccagtctcctggtgtgggggtgcgggtcccccaagggcttccccccaatctcagccccaccctgtcaggggagatccggctcagacccggacaccaggggttcatcccagccccggggcgtgggaaagcctagggtggattagggcagctggagtgcttgaggtcggacctcaaggaggacttccgggtgggtggggagccagaaaggagggccctggggtccctgtctgtcttactctgcaataccagagagcctgactgggttgcagaaatggggggtggaggtatagggggatttggaaactctgtggacccctctaatccatcaccttctcacctcatcccttttctttttctggggaggggacccgaagccaccaaccagcgggagagcctgcatgggggaagggagtaactgtggctgcaatttcactgtaagacttggggtgagggggaatggatttgttgaagggagggagatagatagatagatagatagatagatagatagatagatagatgcatggatggatggatagatagattgataggaagatggtggctcgtcatggtagctcatgactgtaatcccagcactttgggaggccgaagagggtggatcacttgaggtcaggagttcaagaccaggctggccaacatggtgaaaccccatctctactaaaaatacaaaacttagctgggcatggtggtgcatgcctataatcccagttacttgggaggctgagacaggagaattgcttgaacccaggaggcggaggttgcagtgagccgagatggagccactgcactccagcctgggtgacagagtgagactctatctcaaaaaaaaaaaaaaaaaaagacaagaagatgggctgaaggaggaagaaaggtgggagttggggttgggaggggagtggggtagagtcggatagtgagagagagtgcccaggaagggagaaagagatggaaggatggagagagagacaggggccgagatggaggggaaagaaagatgggagaggactcgggaggggtcgagggtgggcaggaagagcaaaagaggttagggtggagacagaagggaaaacaatgcgggggtggggagggagatgggagaggggaatatgggtactagtactgagacgggtaacacaacggcaaaaatagccaacagagattcaaagagacatgatgaaagagttccttggagagacatgaaaaggaaagagcagaggatttctcgactggaactcagacttagggttgagttggttgcctccactctctgattccctaagccaccctggccagactcgtttctccggaccttgtgacctgcagaagcttacagtggtagggccagacatggtggctcatggctataatcccaacactttgggaggccgaggcaggaggatcacctgaggtcaggagttcgagactagcctgaccaacatggtgaaaccctgtctttactaaaaatacaaaaactagctgagtgttgtggtgcgtgcccgtaatcccagctgctcgggaggctgaggcaggagaatcgcttgaacctgggaggcagaagttgcagtgagctgagattgcaccactgcactccagcctgggcgatacagtgagactctcttaaaaaaaaaaaaaaaaaaaagcttacagtggcaggagactaggcggtatccagttaactcacatttggtggctctagccagtgctgtatatagcagcattcccccacccacgcagtgccatgagaccccaggcctcggaggaggcagtggggaaaggtccaggtggagaatggggcagagaggatgggagacagtggttgagaagggataagtagatacaaagaaagaaacaaccttccagcatgcctatgttttcctggcgtgttctgttcactgttgtgttcctgctagactgttggcaccacgagggcaggcatttctgtctgtcttagtcactgcttttattttattttatgattattattttttgagatggagtcttgctctgttgcccaggctggaggcagtggcacgatcttggctcaccacaacctctgcctcctgggttcaagcaattctcctgcctcagcctccctagtagctgggattgcaggcatgtgccaccatgcccggctaattttgtatttttagtggagacggggtttctccctgttggtcaggctggtctcgaactcccgacctcaagcgatccgcacccccaccccccccacctcagcctcccaaagtgctgggattacaggcgtgagccaccgcaactggcctagtcactgcgtttatagcgtgacccggaacaggtctggagccagactgcctggttgcagaatcccagttctgcccccattcttgctgtgtgaccccagcaacctctctgggcctcagctagctcagctgtaaaatgggcatcatcataacacctcctcccatagtatggttgtcaagattaaaggagaccattcttgtgaagtgcttggagcagctaactgataaatattggttgaatgaatgaaagaatatacagagggttacttaggaggcactgcaagatctaccgtgttccattgacctaggatgcaccttttccccccatttgaacatttccaaaaatgggatgcattttacagtcaacagtgtcctatgattttaactgagtgtttttcccatttgtattaatatataaagtaatgctgcagcttccagagaagtcttagatttgaagatatatagtaaatggataatattattaggttgaaaagtgatttctgatattcaaacacttttatgtataaatacagtaatttatttttatttatttattttttttttttgagacagagtcttgctctgtcgcccaggctggagggcagtggtgcaatctcggctcactgcaacctccaccttctgggtgcaagcaattctcctgcctcagcctcctgaatagctgggactacaggcgcccgccaccatacctggctattttttgtgtttttagtagagacagggttttgccatgttggccaggctggtctcgaactcctgacctcaagtgatccacctgcctcggcctcccaaagtgctgggattacaggtgtgagccactgtgcccagcctaaatgcagtaattttataagctaaaagattgaagagagctacacatatatgttagatatgttagattattacagagttataataactttttttttttttttttgagacagaatctcactgtcgcccaggctggagtgcagtggcatgatctcagctcactgcaagctccaccttccgggttcacgccattctcctgcctcagcctcccaagtagctgggactacaggcgttcgccaccacacccggctaattttgtttttgtatttttagtagagacagggtttcaccgtgttagccaagatggtctcgatctcctgaccttgtgatccacctgcctcggcctcccaaagtgctgggattacaggtgtgagccaccgtgcccggcctataataactctttatgattactaaaattgagaactgctgatttacctaataaaccagcagttattaaatgttttggtctcaggaccaccccccttcttttttttttttttttgagatggagtcttgctctgttgtcctggctggagtgtgcagtggcatgatctcagctcaccgcagcctcagactcctgggctcaagcgatcctcctgcctcaacctcccgagtagctgggattacagtcctgtgccacgatgccggctgatttttgtatttttggtagataacagggttttgccacgttgccaggctggtcttgaacttctgacctcaagtgattcaccctccttggctcccaaagttctgggattactttgggaggctgaggcaggaggattactcgaggccaggagtttgaaaacagcctgggcaacatggtgaatccccgtctctactaaaaatacaaaaaaattagctgggtgtgcggtgcatgcctataatcccagctacttgggaggctgaggcaggaggatcacttgagccccagagtttgaggctacagtgagctgcgattgcaccactgcacttcagcctgagtgacagagtgagaccctgtagaaaaaaaaaattatttaggagtccaaacagtttctgttgatgtgggttatgtctatctacgtttacagtatttacaattaaaactgagaaatattacaaacatgtattcatttaaaaatagcaatcatttgttagtgtaaaagatttttattaaaaaaaccaaatttcaaaaaatttagtcaaaagagcgacactgtttttttccatttttgcaaatcaagtctggcccagtggaagacagctggattctcctggttgcttcttcattctctctgttggaatatcaacaccccctggaaaactccactgtacacttcatgagaaagagagtgaaaagggctaataataacttaggattgcgggtgtggtggctcatgcctgtaatctcagcactttgggaggccgaggcgggcagatcacgaggtcaggagttcaagaccagcccggccaacatggagaaaccctgtctctactaaaaatacaaaaaaaaaaaaaaaaaagctggcgtggtggcacacacctgtaatcccagctgctctggaggctgatgcaggagaattggttgagcccaggaggcggaggttgcattgaggtgagatcacgccactgcactccagcctgggcgacagagcaagactctgcctcgaaaaaaaaaatagcattattttgaaaatagttttgacttcgtggacatcctcaaagggtttcagagactgccctgggagtcccgaaccctggagaatcacttaaaggatgatgttgagtgtatgggagcatggtgggtgggaaagcagggggcagaaagggcgtgtccagggagtgaggagagaccttgagagactgctttctacagatagaggtaatgatggaagggatttgtagagaaggcaagatggacagacagacggacactcagtgggtcctgggatcctttgctgaccagcagagtggagccccactgacccctcctttcatctttcccctaggtctactcgccggtgaccccagtgcccaccatggcccccctcaactcctacatgaccctgaatcctctaagctctccctatccccctggggggctccctgcctccccactgccctcaggacccctggcacccccagcacctgcagcccccctggggcccactttcccaggcctgggtgtcagcggtggcagcagcagctccgggtacggggccccgggtcctgggctggtgcacgggaaggagatgccgaaggggtatcggcggcccctggcacacgccaagccaccgtattcctatatctcactcatcaccatggccatccagcaggcgccgggcaagatgctgaccttgagtgaaatctaccagtggatcatggacctcttcccttactaccgggagaatcagcagcgctggcagaactccattcgccactcgctgtctttcaacgactgcttcgtcaaggtggcgcgttccccagacaagcctggcaagggctcctactgggccctacaccccagctcagggaacatgtttgagaatggctgctacctgcgccgccagaaacgcttcaagctggaggagaaggtgaaaaaagggggcagcggggctgccaccaccaccaggaacgggacagggtctgctgcctcgaccaccacccccgcggccacagtcacctccccgccccagcccccgcctccagcccctgagcctgaggcccagggcggggaagatgtgggggctctggactgtggctcacccgcttcctccacaccctatttcactggcctggagctcccaggggagctgaagctggacgcgccctacaacttcaaccaccctttctccatcaacaacctaatgtcagaacagacaccagcacctcccaaactggacgtggggtttgggggctacggggctgaaggtggggagcctggagtctactaccagggcctctattcccgctctttgcttaatgcatcctagcaggggttgggaacatggtggtgggtatggctggagctcacaccacgaagctcttggggcctgatccttctggtgacacttcacttgtcccattggttaacatctgggtgggtctattacttactgtgatgactgctgtctcagtgggcatggtgttgatccacggggtactgtgataaccaccatggatacattttggtggcccactgggtactgtgaggactgctacattgatggatgttattggctaatccactgcatggtttgatggccaccatctcggttggccctttgggtgtgatggtgatagcatttcagtgacatcttctttggccccccccattaggtgctgtgcccacttcttttttggtgtacttggcacagtaggtgccaagttggccaccattctgtgtaacaccttttttggcccattgggtgctttgatggacatcatactgggtaggtgacaacgtcagtgggccaccatgtgccatgatggctgctgcagccccgtgttggccatgtcgtcaccattctctctggcatgggttgggtaggggatggaggtgagaatactccttggttttctctgaagcccaccctttcccccaactctggtccaggagaaaccagaaaaggctggttagggtgtggggaatttctactgaagtctgattctttcccgggaagcggggtactggctgtgtttaatcattaaaggtaccgtgtccgcctcttactgaatgtctcttttccttggccagtgggccctgtggggcttgaacacctgaatttctgctcctctgtcccttctgcttcctgcccctaagagctggctgcctctgggggaggagttgggggaggcatcgacctgacctttggctctttgctgtccctgaccccaaggacagtttgctcacagatagcagcccccgcagcagtggggccagagcagcagggggaggtggctctgcagtgaccaaggccatctccccacccccacttctcagacatacacacagacctctacctctgaggctctgcaagcctaatggccgaataatctttggctaagctggggaggaggaaaaaggacagatgaggtgtcaattcaatgactggagatcgtgcacatgttggagtttatctgcgtgtgtgtgtgtgtgtgtgtgtgtgtgtgtgtgtcctctgtgtgtcataggatagcactatgcctattggggtcctcatggtctaccgcagggtgttgtctgttgtcagtatcccttgattgtgtaggtttttgtgtctgttcataccctgggtatatgcttacttgccctgggtggctgggaatatcagactcttgtgtatgtttttttttgtttttttgagacagggtctcgctctgttgcccaggctggagtgtgtggcacaatcttggctcacggcaacctccacctcctgggttcaagtaattctcttgcctcagcctcctgagtagctaggattacaggtgcccgccacgacacctggctaatttttgtatttttagtagagacagggtttcaccatgttgaccaagctggtctcaaattcctgacctcaagtgatccgcccacctcaggctcccaaagtgctgggtttacaggcgtgagccactgtgccctgccttttgtgtatgtctttattgtgttgtgtgtgtggttctctgtgtacacttatccctgggtctctctgggtctcacactgtgttacgtgtgtgtctatatgccattctctacctaactcactgcctcagagagtgcgtgtgtggaacgagatgcatatggcagggctggctgttcttgtgtgttctatgtgtgtctctgtgagtccgtgtatgtctgcatgcttaaaagaaaacatgtagtctgggtgtggcggcttatgcctgtaaccccagcactttgggaggtcgaggtgggcggatcacttgaggtcaggagttcgagaccagcctggccaacatggcgaagttggcctaaaaatactctattaaaacacaataattaagccgggcatggtggctcacacctgtagtcccagctactcaggaggctgaggcaggagaattgcttgaacccaggaggcagaggttgcaatgagccgaaggttgcagtgagccgagattgcactgctgcactccagcctgggcgacagagcaagactgtctcaaagaaaaaaaaaaaaagaagaaagcatgtgtgtttgtgtgtgtctggtggctacctttgctgtgtacttgtcactgttgcatttgcatctgaacgtgtgtggagagtaggctggcctggtgtctgtcacttttgcaggagagtgtgcggggaaggaaccgtgtcctccttcagccactgtgagcctctgggtttgggatctgtgtttctgtcccccaggtctctcctgtgactctgagtctgcctgtctgttgctcagattggctgtcccagaaacacaactgtgcacctcccacctctcctttcagaatggaaactgaggcccagatgggatgggactgggctaaggtcattcagcggggctggagtgagtgggcaaggttgatctgattctgtcttttccttacctgtcatctgcctttcctggttgctggctctctggttgctcattcatttattcagtcagccagccagccattcagtcatttgaagaccaaagactttgtctaatccacgtgtgtgtgtgtgtgtgtgtgtgtgtgtgtgtgtgtatgagcgcacacgtgcatgcatgcacaccagtgtgacgtgtctttcagtttctgtgggtccatctttttccttgtctcttagtgtccttttttcctctttttctttccctccctcccttccttccttcttccctcttttcttttcttttctttttttttttttttttgacagggtcttgctctatcacccatgctggagtgcagtggcgcaatcacagctcactgcagcgtcgacctcctgggctcaagctatcctccctcctcagcctctcgagtagctaggactacaggtatgcacccccacgcctggctaattttttaatgttttatagagaaggggtctccctgtgttgcccatgctattcttgaactcctggcctcaagcaatcctcccgcctcagcctcccaaagtgctgagattatagacatgagccactgcgcctgaccagtgtcatttctttctgtatcaatctgtccctcaccctctttctgtgcctttatctgtgtttcttggtttgagttgctggtgctgtctgtgtgtgtctgtctctcctatggctcacctcatgctctctctctctctcccccctcgctcacccggcccccgccttttctctctactgctctgacttccctcctccctccacctgggtctctgggtttctccctccttctctcagagtgactctttcctggggtccgtctccccccactcctttcctggatctctggtctctctttctctggcctccatccctctcccagctctctgggtttccgcctctacctgccacctcgcaggccaggccctctattcctgtcgctgcgccccgccttgccggctgcgtgtcacccccgccccctgccgcgctggctccccgtccgtcccaccagccttgctgtcctgggcaggccggggaattcctcccggttcctggaaaaaacaactggggccgagagaaaggccctcagtctccccaggcacccgcccccctccctcgggcctgggggtctctcccggagtcggccagcccgaggcaggaagccctgcggtttctggcttctcccaggcggcctccggatctggcccccgccccccggccaacagcccaaatattattccgcgggaggagtcggtggtggcgggaggaggcccaggctgaaagaggctttcagggcggccaggcctggggcttcctgtccccaggctcgggcctcaggccgccccagtggggacctcaggtggccggaggggcggggtgttgttgtagggtcctcgggggagggtggggccatccgtcggggtgtctggtggccaccagctctgctggcgtgggcaggtgtgacccccaccccagggacagccggctgatgtccagcgtggaaaagtaccacggtcagacatgggacgcatggacagacacgggacgccacgaatcagggatgtggggtggccatggggacacaggcggccctgggctgtgggcctaaggtgacatggtccaggggaggggcctgtgggttggagcagaggccggggcagggtcgcagctgtgggcagagggctgtcagcattaggaggtaccagatgatgatgatgatgatggtgatgatggtgatgatgataattaaaagatcctagggcttcccatgagtcagggattgtgttagcaccttacagaactgatgggctccatctctcccgctccccccaactttactgttgaatgaaactgaggcacagagaggtgaagtaacttgcacagataatgagtggggtgctagggcatgaacccaggcagtctgggcccagagtcagtgcctctaagcaccccgctgttctgcaggatgggagggatagcggcagtgcagcacagtcctggggtcccaagccctccctggcaggcaccccccctctctgccacagcctgccatatggcaggaggtgggttcccagaagccacatactcactggtgaccaggcggttcacagctaggtaggacatgtgtgtctaagcggtttgtcattgggctttattcgcgtgtcttgctgtcagcgtctcaatgtcactgtgtctgtgggctcgtgtgttactccatggtgtgtctctgttgagcgcatgagtgtgtgtgcctggacacctctatgttggtgtccattgctgggtttgtgttggtgtcactgactgtctcaccgtgtacacgtgtaggtgactgttctgtcattgtcttctttgtggctgtcaccatgttctctatgtctgttcatcgctgtgtgctttgtcactatgcctctgtgcctgacaacacatttgcctgtcattgtgttttctgtgagcatgcatcagtgtgtctgtcaccgtgtctgtgacagtgtgtctctgtgactgtttacgtctctgtcactctggacctgtcactgtggctctgtctatatctgtcactgtgtgtcaccgtgtctgtccctctatgtgtcaccatctacccaggtgtcaccatgcatgtgttactcatcgcccaggccacaggtgggtgtgtcgggcccactggtgccagggctgtggcccagcccctcccacccttgctgaccgtgggccaggctgggcgcctatttgcaatcctgccccaggtaaacaccaagatccggaacccaagggccacctccctcacctctgctcctgcccctcagcctgttctgggctggaccagagccctgcagacagtgtgccccagactggaaatgggccctgagcctccccctaaccctgggcaccagcctccccaagccttcagcctcaactctctgtctgtctgtctgcttctctctctctctcactgcatgtcgatttctctgtttctttttgtgcctgcttcctctcacctgggcttctctatggctctgcctctctctggaatgacgcttgtcttcattctgtcactgtccctctttctgtggctctttctgtctctctgcagataggttccatttctctggatgttcagctgatgtgtctccatttgagtccgcctgcttcgtgacacttgctttctatctaatgctggcactgtctccgtaagtctgtttctgtcccactttgtaagtttctcccccaccttctctctgtccaccgtctctctgtctactctgagcctcttagtcttgggcactatctctgtgggtctctgagtccccagcccccacaggggcagactgccatgcctggacccttaggggagtgtgtagcccccagtctcccccagccagtgtgctggtgtgtgtgtgtgtgtgtgtatacacacacacacatatatataaatgtatatgtgcatattatttatatctgtacccaggcaggaggggaagacactggggcctttgtgtagccgctgccctcctgcccgccactcttctcccttcgtccctgccgcccgcccacctccactccccctgcacagaaaggttcctgtggggcctgccagcttcctctgcctgaggtgtgagtgggcacgccacgggtgaggcaggcaggagggcctgggggatttttccagccccaggaagctttccgggtggggagggttctggaaggaatgggagttctcagcagggctgctgtgggtctgtgtggatctgctgtccctgagtgtccccgggccctgagctggcctctccctgggggtctctgagcctgttcgtccatctagttgccattctgacgttttctctgttggtttggggtctcactcacacatgcacacacagtcatcgggcatttgtgttgggctccgtgttgagaacacacagataaatgtcggtcccagcgggttctatgccgtttctgtctcatttgctccatccctttaccctctgcttgaaagctcccaccttttcctattaaaacaaaattcaggccaggtgcagtggctcacgcctgcaatcccagcactttgggaggccaaggcgggcggatcacttgaggtcaggagttcgagaccagcctggccaacatggtgaaatcccgtctctactaaaaatacaaaaattaaccgggtgtgatggtgggcgcctgtaatcccagctactcagaaggctgaatcaggagaatggcttgaaccctggaggtggaggttgcagtgagctgaggtcgtgccactgcactccagcctgggtgacagagagcaagactctgtctcaaaaaatataaaaaacaaaattcaaagtccttatcacagtgtacaggtcctcttactgctcccccaccatccctctgattcaatttcctactactgtcccccagcactggtcacctggttgcttctgggacaaaccaagcaggctcccacctcaggacctttgcaggtgctatttacacagatttctgctggcttactccctcccctccttcagttcttagtgtcacgtgctcagtgagctcttccctacatccctttctaaaatagcaaccccaactggacacggtatctcatgcctgtaatcccagcactttgggaggctgaagcaggcagatcacatgaggtcaggagtttgagatcagcctggccaacatggtcaaaccccatctctactaaagatacaaaaattagccaggcatggtggtgcgtgcctctagtcccagctacccgggaggctgaggcaggagaattgcttgaacccgggaggtggaggctgcagtgagctgggatcgcaccactgcactccagcctgggcgacagagcgaggctctgtctcaaaataaataaataataaaataaaatagcaaccccggctgggtgcggtggctcacacctgtaatcccagcactttgggaggctgaggcgggcagatcgtttgagctcaggagtttgagaccagcctggccaatatggtgaaaccccatctctattaagataaaaaaaaagaaagtaaaatagaaacccccatcactctttatcccctttccctggtttattttttcttcttaggactgaccattctaagtgtctttttttttttttttttttttttgagacagagtcttgctctgtcaccaggctggagtgcagtggcatgatctccgctcactgcaacctctgcctcccgggttcaagtgattcccctgcctcagcctcccaagtagctggaactacaggcgtgtgccaccacgcttggctaattgtttgtattttggtagagacgagatttcaccgtgttggccaggatggtcttgatctcctgacctcgtgatctgcccgccttggcctcccaaagtgctgggattacaggcgtgagccactgcgcccggctggctgtcacattttatggtcctgtttccatctcttacctgaatgccagctccatgagagcaggggctggattctgtttcctgctccatccacattatctcccccagtgcttgtcacatggtggatgctgaataaacacttgttgaggaagagaagcagtccattaatctatccatcccttaagctgaccctgtgctgggtgatgctggggacgcagtggtgatcaagacagccctggccttgcccttttggggctcacagtctgcttgccagacagcaacactccagaatggacagggctgggattgggggagcacagagggatatgtggggtgcagaaatggcagctgatgcagcctgggggtcaggcttcttggaggaggtgccttgactggggactaaatgacccaaacagatccaaccttgcacttcctccagttccctgcctgtctcacagaactttcgagtttgatgatgtcatcactctagttcacacctgtgccttttcctgatttcagtctttctcatctctcctttttttttcatctctttattgccttctctctgcatctcagtctcccctcttttgcatctctgttgttggcagctcatccgtacatctcagtctcgctcaacccatcagaatattgtccatttccttttcttttctgtctctccttctctgtgtctgcctcatctctgaggctctctggagtctctccctgtctcactgggtctccggcttctgcgtctccttgtctcgttcagtgagctggtctctgcatctctccctccccacctctgttgtctcccatcattccctgagtgtctctctgcgtttcccctatctccaagtctctctacctgcttcctgattcccaaataaatccagaacccctccaccctggccccaccctggcactgggggaaggggggctgatccagcccccacacccacacaggtcaggccttctgctctgttaatggttaactcaacctctatctagaatacacaccagccaggctgggggtgactcccctgccccccacccacctaccagctgttcttaaaggaccaggtgtcctccacagcaatttagctcccgctgggacataggagccaggtgtctggaggcctccagctgtaaagatttgggggtgggggagatacccggcacttgggtctgcagagctgggtcaggggaagccacaggcttgcctgggaggggagcccaggcacaggagctccatccaggtctctcttgccccaggcttatcacctggtgtatttaatcaggggtggttttcccagccctgccctgagcccaggctggcagtgccaggggtggcagaacacctgagagctgacggctggggggtggggaaggatgggacccctcagtccaagaacagagggtcctccagatgcgaaggttgaagccctaggatccctaatatctgggagttaggacatgtaggtatgcaagtatgggtgggacccctgggtaaccgagctgatgggtcaggactttaggggcctccagattcaggtgatgggaaccctgggttcccgaggacatctgggggcaaacttggatcccagagctgtctgacagtgctgggtggtggttggacaatcattccctatctctctgtccatccgcgggcctctgagccccgcattcccccttcccggaatctccaccttagcttggccggggaggccgcaggggtgggggctgggctcttggggccgccccctccccttaacccctgctttgccgcagcccgctcaggccccgccccgtgacgccagcgagcaggaagtcctggttaatgatcagccacccggacaggtgcgggacaaggccgcgcacatcagaagcagccgcggagcgagtgcctttcactctgctctctagggtggccgccaaaggggcttgtctcccaagacgagggtgaggaatccagctggggcttcccaaacgtccgcctctggggcaccgccagaggcaagaagtagccaagttgtttctaggcatcctgttagtttaccccgtggaggtaaatttcctctttcctcgggcagtccctctagcagtctaccctaaattctcccttctacccggcaagaacccactgcccatgtcttctaggaagcctcccgctgcctctttcccctccccacgtaggcgctgagtcctccaccttccaggtagagataggggatgggtcagctacagaagggtaatctactcccaagcctgtctgtggctcccctgcaggagccatcccctctctgagcctcagtacttttatctggaaaacgggccgatggctgaaacgtgaccagtgggtcgcacttgttgaaggtcggccggcgggaccgcctgggtgcagggcgccacctggaggctaccgcgcaacgtcctcgccctcgcaggaccagttcagtcccaaagggggcgcagcatctcacacaactaagggaccaagaaggaaaaaaaaaacccatctttcggtttattgaaggagcagaagggagcggggggtgggggggtgggaattaaatgcttttgcctcgtttataaagagcgagttttcaggaggtcccttctcaaggaggaggggggcacctctcccccaactacaagcagcagcaaagccaagccaaggaggacagagggaaactggaggggccaagggaccccaaacaccccctcggacaggagccacaagctttctccccccacccacaatgcatctaccccaggggacccatctgggtggaagaagggagtatgtacacagatagaggtggcactgggctgggtcggggagggaataatttatccgcggcagcggtgggtggcaaaggggcagagggcagtagcctggaggcagtggtagcctaggggtcccgttctttcttaactttgatgtctccagcaaggatggtggcgatctcgccctgcatgaaggcccagggcacggaggagccgaccagcgggcacttgtctccgctcgggcagtacacctccccggccgggccctgcgccttgatgaactcccgggagcagggaaagcagaacttgtgtccgggcaccgaggggcactggacgaagtgggtgtcttctagccgctccctgcacagggtacagcacaggggggccccaggggtcgccccagtgccgctgccacccccgctgacagcttcggcccccgctgtgggactgacttctgcttcgccgttgcgggccacaaggcgatgctgggttggcggctgggccgtggaggaggctgcagggctggcgccccctgcacgcacaggccccccgcctccgccagggtccttgggtgagtggcccagggcttcggccacattcttcagggcggcaatgggcgagggcacaccaggggtctcagcggagtacgggccgccgggtgccacccagtgccgttgctgctgctcctcggtggtcatcttcccagccgcctcgccctccggctcgggggatgccttgcgacggcgcggcgtgggcgccaggttccgggatggggctcgcgggggtgggccacagagagccgcaggggccggctctgggtactgctggggcagggcctccgcgggagctggctcgcggaagctgcggacgccgtcggtaagcagctcgcccagctgccgccattctcctgatccatgccggcgttcatattcgaggtacttgaagcccgaagaagccagtgccttgcccggctcccgcagagcatcgtggaacatctggcgagccactgccaggacgccggcgtacacattgccggaaccacaggggtattcggtgaagagcttcagctcgaactcgtatcctggaggacgggcagtagcatcgaaggcgaacactcgccccaccagcccgtgatccttcttgaagcgcacattgaacggggcgcaggcggacagcgccagtagctgttcccgcactgctttggggcgcccgtgccattcctctgcccggcctcgcatggcctcgttcagttctgccagacagtccgcattcctctgctgcttctctttctcgaaatcggagccgaagaggggacgggcaggactcaagccgggtgccagcgtcaggcctcggcttcccaggccagacactgcagctgccagcagcccagggggcatcaagccaggcatggagccaagcaaggcccttcgcgccccctcagccacggcctcctcacggcccagcccattggccaggcgggaccccagagtgtactccagggcgggcgagggcagggggaggcggcctgatgatgtggccctgtcatagcggtcctggcccgacacgccgccgccggtccctgacggctggggctgggcctgcgggggcggcagctggggcccctgtgcggctgccgccgccaggtccttggtggccgggtgcttaagggccgggggcccgggcgagcggccctcggggagcacgtggctgcgcttgagctggcgggcggcatcgatgagcagttcgatgcggtccgcgccctcgaagttcacgcagccgcgacacacggcctcgctgaagtcccacaccatggcccacggcatcttgggcaggtcgcacaggtagcaccactggcggcgggacgcctgcacagacgccatggccccagtccgcgcgccgcccagctcccgcgttccaccggccgccgacgtgcgatccgcgccgccaacgttcgatccgcgtcccggggacagcgcgagccacggtccggcctccggctcggcctccccgccggatccaggcccggccccccttccccgccccctgggccctaagcctttctgctcactcccgcctccctcgcgaaggcaggctgaggcacgtcggcgcccccgcccggtccgggctccgagccgaggcgcacagctcgggccccacgatgggccgcgagcgccgccgcctcgggctcccgccgctctcgccgccgccgctgcaacggccgccgccgcctccacctccttcttctgccccagaggccgcttcgcagggaaagttacataacacgcctgcaaagccttctgggaaacgtagtcccgccggggccggctcttaaagggaacggcgggcagacgcgggctgggggggttgtcgcctctgccggcgcaaaccttacaaccttctccgtggggccggagttcagcgcgccgcaagatgctgggacacaaaggtggtaggcgaggatgcaatacaaatgatcagagctactccggattcagaaattgtgggggtgggtggacaggcttccgggcttccaacttctgctcggatttgctgtgcagctttaggcaaaatgtcttgccctctctgaacctcagtttccccgcccagcaaaggtgggccaatgacggattaggaaagtagcagcttctggggcggggcggagaagccctgattggcttcagagcagggacgggaagctggcaactaggtgggggtgggggtggccacctggcacttcgtcctccccccggaatcctagatatatgcttctggggcccgccacagccagagaagggagaggactaagggcttccgagccagagccttgtctcagttgtttctctgctaaaagagtggggcgactggccgccctctaaccctgtcccagctctgcccgcgcgctctggtctctaaagggttacaccatcgggggctcggcgtcccccacccgcttcactacaattcccaaaatgcactgcgggtcggacatagtgacgcacttccgccctctgggaggtttggggaggccttccagattcacgctactttcccggctaccccccgcccccccacttttctgggggctctttacgtgcattcggagcgtggcgtttgggggacccttatcttctgttgctccccagtttgagggaagagtaaggggttaagaagtgacgggcaagaggagggagttgctggggaagggcaaacaccagaccaacctttccccaaccttgagcgctcactacctggaaggcccaatcaggctgtgaggacccttcttctttcccaggcattgggaactggacgaggctgtctttggggaagggcggaggcgggtctccaggttccaacccacaacagcccctttctctaggcctgggtccgtgttaggtgctcaaaaatatttgaatgacgtaccagttggccctggttttgtctagtgaggggctgcttgtcccttctcctcccgtcccactggaaccgcagcagctctgattctgttacccagacctcacaattttaaaatggtttcacaattttgtctactacctgtatttgaacacttttctcccttaaaaaaaagatttatcaggctgaagtgggaggattgcttgagcctggagataacaggctacagtgaaccatgattgcgtcactgcactccagcctgggcaacagagcaagatcctgtctcaaaaaaataaataaaaataaaaagatttatctatttttgcctcatcctaggtaatacgttcacaatcatgggtttcatgtactgtggttaccttaaaaaaaattagtgaaaactatcgactcattcaagaggacattaatatgtcacttaaagttgcctttgggctattatttacgaaacactaatgggagttaaggcttctggccagattcagccttcaggtggactggattggcctctgaccagctgtggccttgggccagtttctaaacttcttggaaaaaatggagaccccctccagtctccttttatttgggtaccttcagattgaatgcaaacatgcatataaatgcttagcttggtgcctggcacagaaaataagtgccacaaatggaagttgtttttaagctggacagttattcaaatattcaacccctcttccatgctgggcaatgctggggacatagcagtgactgagacaggctttaagccttgcccctgagaagccccagcctggtgatggaggcagatagtaaatttactcaaatgatgaactaaaatttgtgatgactgcggtggggaatgtgtgtcaggaaaagctttcctggccatagtggctcatgcctgtaattccagcactttgggaggccgaggagggcggatcacttgaggtcagaagtttgagaccagactggccaacatggtgaaaccttgtctctactaaaaattaaaaaattagggggccgggcgcggtggctcacgcctgtaatcccagcactttgggaggccgaggcaggcagatcacaaagtcaggagattgagaccatcctggctaacacggtgaaaccccgtctctactaaaaatacaaaaaattagccaggtgtggtggtgggcgcctgtagtcccagctactcgggaggctgaggcaggagaatggtgtgaacccggaaggtggagcttgcagtgagccaagatcgagccactgcactccagcctgggcgacagagtgagactccatctcaaaaaataaaaataaaaaaaaaataaataaataaaattaggccggacagtggcagtggctcacatctataatcccagtactttgggagccctatcacttgaggtcaggggttcgagatcagcctggccaacacggtgaaacccccatctctactaaaaagtacaaaaattagccaggtgtggtggcgcacacctgtaatcccagctactcaggaggctgaggcaggagaattccatgaacccaggagatgagttcacaccactgcacctccagcctgggggacagatgcaagactccgtctcaaaaaaaaccaaaaaacaacaacaaaaaaacaaaaaactaactaaataagtaaaaatacaaaaattggccaggtgtagtggcacacgcctgtagtcccggctacttgggaggctgaggcagaagaatcacttgaacccgagaggcagaagttgcagtgagccaagaccgcgccactgcactccagcctgggcgacagagggagactctacctcaaaaaaagaaaaaaaaaaaagaaaagtataatctaattataggaagaaagactctgacatctttatgtccattctacagatgaggacactggaagccaatggttacacagttggccagggcagcaccagtacttgagccacgtcttgagtccagagtggtggtgattatctactttgttacctggccctgcagcagagtaaaagaaccagttcctgccttcatgacattatgggcaaatgtgccttaaatagataaaggcctgtgttcatttagagtcactatgaaaaagaacccagctgtgtgtggtggctcatgcttgtaatcctagcactttgggaggccgaggtgggaggactgcctgagcccatgagttccagatcagcctggacatcatagaaaaccccatctctagaaaaataaaacaattagctgagcatggtggcacatgcctgtggtcccagctacttgggaggctgaggcagaaggattgcttcagcctgggagatcgaggctacagtgagttgtgatcatgccactgcactccagctggggcaacagaacgagatcctatctcaaaaaaacggaaagaaaagaaaagaaaggaaaagaaaaagaaaaagaaccacaggacactgaaagagactctaagaggcaaacccacgttagccttggggaaggaatctaggactttctcctggagttgacatttagactggtatctaaaggaagagtaggaataagatttcatgtaaacacaagacttgatggctttaagaattaaaaaaaaaaaaaagctggaaaaccaccagcctcccaattgcctgcctgtggagggggcggggcaggtgtaggtgctggtcccccaggcctgtctcagacagagcctcaagtaattgtattaaaaataagtttattgatatcttgtcaccactgggagaaaggagggggttgagctctggaagtcagagacagcaatggtaggcagagaacccaacctgtacctctcccatcagaactcggcgcctcctctccctggggtatacacggctatatcctctttgtcatccgtattttgatttgtcttacaactcccacccgctccaaagtctgggttggggaggtggggagtcccccacgggtcaattctcttcaagtcaagaacaggaactgttagggaaggggagatgtgcagacccgagaggttccctccccaccccacatagggcaataataaataacatgaaattgatggcttagaagtcagggttaagggaggcagccaggcagacagcactgtaccagagaaaggggttgggggggcccattactgaggccccccccagagaatcaggcactaactagcacagggagtgggtgctcacatccctggagcagggagctagggtgcagctgggatgggcagagagcatcgcccccctcgactgcgccaagctggggagaggggttgcaggcaggatcatagatagtagatttcacggagatttccatcggccgcgccttttccgtgtagggaaaccttttctccgcttgtgtgggggggagtcgtgcggagggagcggggctggggggggccggggtgccccctcctcgctccttggggcaatgatcactcccctggctgccaccactgccccgtccaccacagcagccaccacggacacgggctctggggtgatctccaccttgggggccggtgggggcaggacaggcctgggaggtggcggtgggggtgggggtgggggcagaggtggaggcagggagtcaactggggttcctggcagaaggggcagcagagcgctgagggcctcgctcagtttggccagtccctgtcgaagggtgccggccagctcccggatggcgttggcagtctcctgctgggcccgcaggaagtccagggaggggtctgaggccgagagcgtgggtggaggccgaggagggggtggggggctagggggtgagggtgccacttgggccagtggcggtgggggtggcagtggaggggctgggggtggtggagacaaggccaggcgaggcagctggaccggctgcagggccgaagggggtggtgactcacgctccttgggccgtgggcagcccccttcctggggagtgcaggagggccgggcccatggctccgggctgctggagcccgccttgctgtgggctgatgtatctgtagagagagaaatacaggtaaggggtgagcgaccctcgatgctgccttgatttcccctttcccactccttccctcacctcccccctacccgaacccagaactatccttctcacccccgccccccagccccaagacagtcttggtctgtcacccaggctgtagtgcagtggtgcaatcttggctcactgcaccttccacctcctgggttcaagcgattatcctgcctcagcctcccgagtagctgggatttcaggtgaccgccaccacacccggctactttttctatttttaataagagacagggtttcaccatgttggccaggctggtctcggactcctgacctcaggcgatccgcccgccttggcctcccaaagtgctgggattccaggtgtgagccaccgcgcctggccccagaatgatccttttaaaacctaagtcagatcatgccttggaagagaagctccatggcaggccagtctttgtacccggaggagaaaaagtcctgccagctttagtggaaacaggtcctggaagtcccttgctaggccaggcagctcccatctcactcacagtaagagccaacagtttttttatttttttaattttttttgagacaaagtctcactttgtagcctaggctggagtgcagtggcgtgatctcggctcactgcaacctctgtcttccggcttcaaacgattatcctgcctcagcctcctaagtagctgggattacaggcaggcgccaccccgcctggctaaatttttgtatttttagtagagatggggttttgccatgttggccaggttggtctcaaactcctgacctcaagcaatccacccacctcggcctcccaaagttctgggattacaggtgtgagccactgcgctcggacaagggccaacatttgacgaggttctgaactatatggatactgcaccacactgctggatcctgaggaagtgagagagaggtctgggagagagctggggtgtctgggcactggtggacacttccctgagactctctccaaccaggacagcaggattttccagttcagcccccagcctggtaggtttcctcagtctgtactcacctggggtctcattcatgctcatgggcttgaacagtttgcatacaggggctcccagcttcctgggctcagcctgaacctctcgcctgggctccagactcctgtctccagctgtgtactctcaattgtcgaaaaacgccccaaactcacttgctcggagctgggcttctgatcctcccccaccctgctccttcctcagccacccccatctcagctgatgcagctccatcctcccagctgctcaggttaaacaccttcactgttttgtttactaagacaccatccacatacagaagctatcgtctctgccttcaaattaaatacatacaacttctttcttcctggtcccccaccctggcccaaccaccagtatctcccaccaggaccactgcagtcatcgcctccctgagggctctctgcttccacccctgtccctgacagtatctttttccaccagcagcctgaggggtccaaccaaaatacaagtcagttaggctacgggaaacaagctagtcacaaagaaccacagatcacaggggccatttatatgaaatgtccaaaataggcaaatttggccgcatgtggtggctcatgcctgtaatcccagcactttgggaggccgaggcgggtggatcacctgaggtcaggacttcaagaccagcctggtcaacatggtgaaaccccatctctactaaaaatacaaaaaattagccgggcatggtggcatatgcctgtaatcccagctactggggaggctgagacaggagaatcgcttgaacccgggaggcggaggttgcagtgagccatgatcgtgccattgcactccagcctgggcaacagagcgagactctgtctcaaaaataaaaataggccgggtgtggtggctcacgcctgtaatcccagcactttgggatctgaggtgggcaaatcacctgatgttgggagtttgagaccagcctgaccaacatggagaaatcctgtctctacgaaaaatacaaagttagctgggcatggtggtgcatgcctgtaatcccagctactcaggaggctgaggcaggagaatcgcttgaacccgggaggcagaagttgcagtgagctgagattgcatcattgcactccagcctgggcaacaagagcgaaactccgtctcaaaaaaaaaaaaaaaaaaaaggcaaatctatagaaacagaaagtagatgagtggctgccgggggctgggggaagacagggaagatgggagattggggatggctaagaggtgcagggtttctttctggagtgatgaaaatgttctaaaattgatcgtggtgatggttgcataactctgaatatactaaaagccattgaattgtacgctgtattttattttactttttttttttttttttgagatgggagtctcactctgtcgcccaggctggagtgcagtggcgcgatctcagctcactgcaagctccgcctcctgggttcacgccattctcctgcctcagcctcctgagtagctgggactacaggcgcccgccaccacgcccggctaattttttgtatttttagtagagacggggtttcactgtgttagccaggatggtctcgatctcctgacctcgtgatctgcccacctcagcctcccaaagtgctgggattacaggcatgagccaccgcgcctgatcctgtacactttatttttaatttttatttattttttattttttgagacggagtctcgctctgtcgcccaggctggagtgcagtggtgtgatctcggctcactgcaagctctgtctcctgggttcacaccattctcctgcctcagcctcccgagcagctgggactacaggtgccctccaccacgcccggctaatttttttgtatttttagtagagacggggtttcaccatgttagccaggatggtctcaatctcctgaccttgtgatccacctgccttggcctcccaaagtgctaggattataggcgtgagccaccgtgcctggccttaattttcatctttttttgagacacagtcttgctctctcgctcaggctggagtgcaaaggtgagatctcggctcactgcatccttaatctccccagcttaagcgatcctcccatctcagcctcctgagcttctgggaccacagaggtgcgaccccacaccaggataattttatttttttgtagagatgaggtctcactatgttcctcaggctggtttcaaactcctggtctcaagcaaatcgtacactttgaggtgattgtatagtgtggaaattatatcgccatatatatatacatttttttcttttttcttttttttttttgagatggagtctcattcagctgcccaggctggagctcagtggtgcgatctcggctcactgcaacctctgcctccagggttcaagaaattctccaccctcagcctcctgagtagctgggactataggtgcacaccaccatgcccagctaatttttgtatttttagtagagacggggtttcaccatgttggccagatggtctcgatctcttgacctcgtgatccacccacctcagcctcccaaagtgctgggattacaggtgtaagcactgcgcccggccttatattgcaatataattgtttaaaaaaacacaagtcagatattgtttctatgctcaaaccgtcctgtggctctcacctcactcagggtaaaagcaaagtccttgaggcctctagggccctgcacgatcttcccccattgccttcctgacctcagctcccatccctccctcttgggttacctggctgtagccacggtggcctccttgctgatcctcaaacacatcaggcctacttcttttcttttttttgagacggactctcattctgtcgcccaggctggagtgcagtggtgcaatctcggctcactacaacctctgcctcctgggctcaagcgattctctcacctcagcctcctgagtagctatagctgggactacaggtgtgcaccaccacgcttggctaatttttgttttgtttttgtagagacagggttttgccatgttgctcaggctggccccatctccttctttttttctcccctaaccctacctgattcctctcccagcacttatctccacctggcacggtatggctctgtgtctgctgtctgtctcctcctcctgatgtcagctccatcaggcagggctttgtattgctcccttctgtttacccggcgcctagaacaatgtccagcacaacattttttctttaacgagaaaagaactggggcttccagagactcagcgctgattgggtcccaggccccagagtgcccagcacccacaggagaaagtccagcctcttcccacggctatggggcctcagcacttgcccccaactccgcctgtcttcccacatgtcgttccctgggccaggctcacactgcctcttgcatcagcttggatgtttttttggatgttccttcctcggggaagctggcctcctgctccttggccaaatcagatcaccctgctcttctctcaaaaacagccagccaaagaaagagagaagatagagaaaaaaaaaataacaaaaacaaaaaaccaaccatccaggccgggtgcggtggctcagccggtaatcccagcactttgagaggcccaggcaggcggatcacctgaggtcaggagtttgagaccagcctggccaacatggtgaaatcctgtctctactcaaaatacaaaaattagccgggtgtggtggtgcacgcctgtgatcccagctacttgggaggctgaggcacaagaatcgcttgaaccctggaggccgaggttgcagtgacccaagatcacaccactgcactccagcttgggcgacagcaagaacctgtctcaaaaacaaacaagcaagcaaacaaatcagccacctcctaccctgactgctgggagtccagcctccctgggccagccaccagcaggaggtagggaggctgggagacagatgagtagagcggacagtgacaggacacctgctcccgccaggccctgggctaagctcccctcttaagtgattccacctagtcttcccagccattctctggggtaggtgctaccatgatcatcgccccattttatagatgaggtgatttgaggctcagagagaggtgtcatagagtgatatgcagaaaagggatttgaacccaggttgactccagagtccattcttttttttttttttttttgagacggagtctcgctctgtcgcccaggccggactgcggactgcagtggcgcaatctcggctcactgcaagctccgcttcccgggttcacgccattctcctgcctcagcctcccgagtagctgggactacaggcgcccgccactgcgcccggctaattttttgtatttttagtagagacggggtttcaccttgttagccaggatggtctcgatctcctgacctcatgatccacccgcctcggcctcccaaagtgctgggattacaggcgtgagccaccgcgcccggcctcttttgttttatagagatgggagcctcgctatattgcccaggctggtctcaaactcctggcctcaaatgatcctcccgccttggccttctaaagtgctgggattaccggtgtgagccactgctcctggccagagtccatggcctttttttttttttgagatagaggctcactccatcacccaggctggagtgcaatggcgtaatctcagtttcctgcaatttctacctcccagtgcaagcaattctcctgcctcagcctcccgaggagctggaattataggcatatgccaccatgcctggctaatttttgtatttttagtagagacaaggtttcaccacattggccaggctggtctcaaactcctggcctcaagggatccgtgtacctcggcctcccagagtgctgggattacaggtgtgagccaccacaccaggccagagtccatgctcctaaccattccttgggcaagggctgtgggcctggggtgtgagtgacaaatcttccttataaggaacgtgggaattgcagaaacgtggcttttccagtctactgagtaaaaaggaacagaaagtagcccagccttcatgcccacaaggctcacaggagtcacagcagtgcccctgcaagagtttgtttttggttgttttgaggaagggtctcactgtgttgcccaggttggagtgtagtggtgcgatcatggctcactgcaacctccgcctcccaggttcaagggatcctcatgcctcaacctcatgtgtagctgggaccaaggcgccggccaccatgcctggctaatttttggattattttgtagagatggggtctcactttgttgcccaggctggtcttgccctcctgggatcaagcaatcctcccacctcagcctcccaaagtgctgggattacaggcatgcctctgtgcctggcttccactgtttaaaagttaaaatcatatttatttgcaaactttggatctcagtttccctacttgttttcttttctttttttttttttttaagacggagtctcgctctgtcacccaggctggagtgcagtggcacaatctcgactcactgcaacctccacctcccaggttcaagtgattctccagcctcagcctcctgagtacctgggactacaggcgtgtgccaccacgtccagctaatttttgtattttttagtagagacggggtttcgccatgttggccagactggtcttgaactcctaacctcaggtgatccgcccgccttggcctcccaaagtgctgggattacaggcatgagccaccgcagctggccctcagtttccctacttgtaaatgagtgtgtgagctggtactacacagagtgctgggatttcaggcgtgagccaccatgccaggcctgtgtatggttcttttttttgtttttttttgagactgagttttgctcttgttgcccaggctgaagtgcaatggcgcgatcatggctcactgcaacctctgcctcccgggttcaagcgattctcctgcctcagccttcctgagtagctgggattacaggcatgcgccaccacgcgtggctaattttgtatttttagtagagacggggtttctccatgttggtcaggctggtctcgaactcccgacctcaggtaagccacctgcctcagcctcccaaagaactagtattacaggcgtgagccaccgtgcctggccaggcctgtgtaagattctaatcgaggatgctctacgcgtgttcctgcctcagagcttttgcacgtgctgtttcctctagtctagcaggagtgcccttctcccagatgtctgtcaggcctactctattcccatctctacttgaatttcaccttctcagagaagccctccctgattaccctgtctgtatagcccccttccatgactcaccatcctctgaatatgacttatttatcctcttagttctcaccacctcctggtatacagtctgttttgggacttctttgtggtctgtttcctccaactacatagaatgtcagctccaggtcgggtgtggtggctcacgcctgtaatcccagcactttgggtggccaaggcgggcagatcacctgaggtcgggagttcgagaccagcctgaccaacatggagaaaccccatctctactaaaaatacaaaattagccaggcatggtggcgcatgcctgtaatctcggctactcgggaggatgaggcaggagaattgcttgaacctgggaggcggaggttgcggtgagccgagattgcgccatttcactctagcctgggcaataagagcaaaactcagtctcaaacaaacaaacaaacaagcaaacaaaaaaagaatgtcggttccataagggaaggggattttgtctttttctctacattattccctgcacctaccacagcgtctgccttggatgaggttctcaatatatatttgctaaacgagtgaatgaagtggtaacaagtttctgaaaaaataagttggccatctctgctctggtcctatggggccatctcacagatggaaacactgaggtttgattcaaggtttgagaacaagggtcccatgtgattgtgtcaccttcctgcttaggagattttcatgcctcctgaatgccctcaagagcaagtccaggccgggcgtggtggctcaggcctgtaatcccagcactttgggaggccgaggtgggtggatcacctgaggtcgggagttccagaccagcctggtcaacatggtgaaatcccatctctactaaaaatacaaaaattacctgggcatggtggcaggcacctgtaatcccagctactcaggaggctgaggcaggagaatcacttgaacctggggaggcggaggttgcagcaagccaagatttcgccactgcactccagcctgggcaacagagcaagactccgtctcaaaacaaaaaacaaaacaaaaaaaatagtaagtccaaattcctgaccttgacttccaagccacgtgtaatctaattctggcacactcattaactcctggtcaatattaactcttgttattgctgggcaatcttgctcagtggttaagtgccatggactgggggttggacgcacacttatgcttgagtcctgactctgtcacttacttgctgtgtgaccttgggtgggtgaatgaacctctctgaatcacataatcttgaactgtcttgtttgatcatgcccatgttcctccccttctccaaactcttcagtggcttctcatagcagtcaggataaaatccaaactcctcaccttggcctaaaggcccagtatggtctggcctttgctgacctctctgaactcatctcaaaatgttacttttcttcaacctttccactctacactcttttccccgcaacttcttttagtttcccaaactggccaagctttcttgcctccaagccattgtacatgctgttccctctaccaaaaatactttcccagttcttcattcttactctttgcatctcagctctgatgtcccctcctccaggaagccctcctggaccacccccccccccaccgaaatcagaaaccctctctgggctcccacagtccctgggatcccctaccccagccctgctccctcaagtcatcaccgtcttccccacccccctactagactggctcagtcatccatgtgtccccaacctcatcgagcatggggcaggtgctcagggaacggctgtagaagaaataatccagaatcaaggctaagcaggaagtttctgtagtcagctctccacacctctatccaaggcatgaccttgggaaaattaccaaacatgtctgagtcttttatttatgaaatagtgaaatagtatgcatcttaccgcattgatgattctatcaagaactaacaatgagagttgaggaggtgctgaactaagcaacttacccatattagctcatttaatcttcacagcaacgctttgaggtgcagactatttttatctccattttacagatgcagcaactgaagtacagtaacttactcagatgacacagttcagtggcaaagttgtgatcggagcccaggcagcctgcctccagagtcactactcgacactgcatttaatgaaatcctgcctgtgctgatgaccccaggtgtggacctgagtcaggcctcctaaatctggttccattcctggctcttgacagttactagctatcggaactgaggcaagtcatttcatttttctgagcttcagtttccctagctataaaatggggcgaaggacagcatccacctcacagggctgcagcaaggctttgatgagacatgtaaaaggcttgcaacagcgcaggcacacagcctactctgaagacactcacctgcacgtcggtcctcccggcggtcttccgacaacacgtagcgctgagggcaggcgcttgggggcggcggctgtgaagagggggccgcagggggctcctccgccccagcacctgcccccggcgccgccacacctggccccaggatggcaaaaatggtctcctcttccgcggagaaagcgtcctccgcggcgggcccggcgccctgcgtggagtgcggcacgcgagcgagcttctccttggtgcggcgcttgaagtcgttccagcgcttctgcacctcctggcccgtgcgcttccagctggtgataccgttgatcttggcggcgatgccgtcccacacgcgccgccgctctgccacgctcacccgacggctctgcgcgccgtagagctgcgggtagtgggcgcgcacctcgcggatcaggatctggttctcttcgaatgagaagcgcggcttgcgcaaccgggtggtttcctccgcttcgcccgccgccgccgaggccatggcgccccccgacgccgccgtcctgccgtctggcgcatggggggcgccggcgctgcgggcaaagggcgcacggggctggctggggttcggggtccccccgccgccgcctctcccagaccgccgggccgagagctccttagtccccgggggcaggagtgggggcggggggcgggcgggggcgacgggcacccgggtaagtcggaagcgcctaagagtagctgacaccggctgagcgcttggctcggacttcgcgcggcgcgaagtgccacgctgaagagttgatagaaattgggggagggtctggagggatggaaggaaaggaggaaaagtgcgaggagaggaggtgtctgcaggagttagagaatgggggcacgggaggataggaaatggagggaggatgggggtgcctcgggggggtcttagatgcatgaagataaggagatgcggaaggggggatgcagcaagaaggggggaatctggagcagaggaggcgctctaggggctctagggggcaacggggcgtctgtaagaccgatatgagaagggcccttagagggatgtccaggaataatggtgaggtgggagctcctgtatcactggaagagctggaacgatcaaatattagggatcagggtctgcgaggattgtgggggctctggggattgccagaaattaaggggagctctggaaataacgggggtcccgtatcacaaggagacaacggaggctacgggggacggcagggagagcgaaggtcgcggagggtggggaccgagtcgggccacgggtcactcaccggctccgccgcagccgccggtgggtcagggctcgggcttctgcggcctgttcccaccccccgcctccctccctcccctctttcggccccgcctccggccgccccgcatgccaaggcgcaggcgcgcccagggccagtcggccccaatgcccttaccgccagggtttcattcccacctaccccagcacagcgcaggcgcagaactgcgctccgccgagccccaccagcaggccgcaactgcgcagccgcaacgttagcgccgcgcgggtaccccagcttcctggggccacaacggcgcacgcgcaaaaactccatcgcgcgcatgcgcgtgcctcgggttgtacccggtaccgggtctcggcgcaggcgttgcgagcttggatgggagagatgctgggagcgcgccagtacccaacctttcggacagtcttccagcccaccctgccctctaaccaaaggggagggagacagcgctgaagggaagcgctttgtctccttgacaactgtgtgggtggggtggaggcgtgaggaaaccgctttgcctcctggcttgcccgcccctgcgctgggccgctccagagcttcccacctcgcacccctagaggctgggcgtcctggggatgtcccgccccgggcggatgcagtaaccatagcgacccacaagccttccagtcacgccttgggggcccctctgtgcgcacctttacctcgaggagcggggaaaataagagggaagagcttcctggctggtaggaagggagatcctgacgccggcacgactttaagcaagtgcatggagacaggaatgaagccagaacgcaggtggggtgagccgcatggcaggatgatggagctcagtccggctgagaagtgtgttcgttagcatcctgcaggagtcctcaaggtcattcgacaattggtgcttcattcatcgactcaataaatatacatgagcacttacacagttcctggtacaatgaacataaaagctaaaatccgtagcctgggccgggcgcggtggagctcacgcctgtaatcccagcactttgggaagccaaggcgggcggattacctgaggtcaggggttcgagacaagcctggccaacacagtgaaaccccatctctactgaaaatacaaaaactagctgggcatggtggtgcatgcctgtaatcccagctactcgggaggctgaggcacgagaatcgcttaaccccgggaggcagaggttgcagtgagctgagattgcaccactgcactccacctggacgacagagtgagactccgtctcaaaaaaaaaaaaaaaaaaaatacatgcctgtagtcccagctacttgggaggctgaggcgggaggatcgcttgagcccaggagttgcaggctgcagtgagctatgatcaggccactgctctccagcttgggcaacagagtaagaccctgtctcaaaagaagagagagagaaaaaaaaggcccctctgcctgctgtgtggagggtgggtgggagggagcaagactactgggtagagtcaaaaaaagtcatgagcaggggtaagaaaaggattaggaaagcgaggggagactaaactaagacagggacagtgtcaagggggacacggagagacatttgagagaatatatggaaagcatggtgagtgtcgcgctagcgagggaaaggaagatgtctaggtgaaacccaagtctctggcccaggttctcacttgggggtgtggggtcaggtaagatgtggtgaatgtaaggctgggtgcagtggctcacgcctgtaatcccaacactttgggaggctgagacaggtggatcatctgaggtcaggagttcgagaccagcctggccaacatggtggaaccctgtctctattaaaaattcaaaaaaaaaaaaaatagctgggtgttgtgccatgtgcctgtaatcctagctactcgggaggctgaggcaggagaatctcttgagcctaggaggcacagattgcagggaaccgagatctcaccactgcactccagcctgggcgacagagtgagactctgtctcaaaaaaattaaaaaaaaggccgggcgcagtggctcattcctgtaatcccagcactttgggaggccgaggcaggtggatcacgaggtcaggagattgagaccatcctgactaacatggtgaaaccccgtctctactaaaaatacaaaaaattagccgggagtggtggcaggcgcctgaagtcccagctactcgggaggctgaggcaggagaatggcatgaacccgggaggctgagcttgcagtgagctgagactgcgccactgcattccagcctgggggacagcgtgagactctgcctcaaaaaaaaattaaattaaaaaaataagaacaacaacaaaaaaaacacaatcaaaaaaagatacgtgagtgtaaagtgaccaacaggttgaactgtttcccccaaaaagagaggctgaagtcctgatcccccagtgcttcagaatgtgaccttatttggaaatagggtccttggagagggaattcgttgagaggtagccataccagtgtagggtggacccgtcattcctcattcccggtgtctttataagaagaggagacacacagggaagacaattctatggtgacagaagtggagacgggggtgacgcagccacaagcccaggaaggccctgtgctatcagaagctggaagaagccaggaaagatcacccgctggagccttgtccggagtgaggccacgcccatgccttgatttcggattttcagcctggtgaatctgggagacaatacgtttctctctctctgttttttttttttttttgaaatggagtcttgctctgttgcccaggctggagtacagtggcacgatctcggctcgctgcagcctctgcctcccggattccagtgattctcctgcctcagtctcccgggtaactgggattacaggcgcatgccaccatgcccagctaatttttgtatttttagtagagacggggtttcacagtgttggccaggctggtcttgaactccttacctcaggtgatccgcctgtctcggcctcccaaagtgctaggattacaggtgtgagccaccgtgcctagccacgtttctcgttttaaaccacccagtttgcggtaccttgtcatggcagccacaggaaacaaatgcactggggaccccgggaaggcattcggggagctgcattcagggagctgctgcctccatggcagtccaggcagagagttgagtctaaacctggctctgggttcacgaggcggtgggaggtggagagccacagcagtggggtatggagctccacagatgtgggtagctggaagctggatgcaggaagtcagagggcaagactcctggggtgagggtgggtcagggaaggctttctagggccacattttctttcttgtcttgcctcttttcttttcttgatggagttttgctcttgtcgcccaggctggagagcaatggtgcgatctcggctcacagcaacctctgcctccctggttcaagcgattctcctgtctcagcctcctgagtacctgggactacaggggcacgccaccacacttggctaatttttgttttttttttagtagagatgggatttcacccgtgttggccaggctggtctcaaacacctgacctcagatgatccacctgccttgtcctcccaaagtgctaggattataggcatgagccactgtgcctggcgaagggccacattttcaaaactgtgagttgtgagtccttttttttttttttttttgagacagagacttgctctatgacccagactggagtgcagtggtacaatcatgcaatcatgactcaaacttccaggctcaccctcccacctcagcctctagagtagctggaactacaggcacacaccatcatgcccggctaagttttaaaattttttgtagagacaagatcccactgtgttgcctaggctggtcccaaattcctgggcttgagcaatcctctgtgaggcctcagcctccaagagtgttgggattacaggcgtgagccactgagtccagccaaaactgtgaatcttgacccattagtgagtccaggaaaatacttaggaagttgcaaggagagatatttaggaggaagaatggacaggacttggaacctgatgggctgtgaggggtgagggaaaaagcctagatctctggccctggagacagggtacattacatggtagggccggccaagatggggacttgaggggtagcagatgtgggggtaagatgctgaagtggtttgggatgtggtgggtatgaaaggcctggggaggtttggggaatgaggaagagcatccaggaacccatcaggtatgtggaagagggctggaggcagaggcggagtggaagctaaatttttgttttgttttgtgttgttttaatgctaaaagaaatggatgcaacaagcatatcaagtgctgccctagggctgggcctggttgctcatgcctgtaatcccagcactttgggaggctgaggtaggaggattgcttgaggccaggagttcaggctgcagcgagctattatcttgccactgcactccagcctggacgacagagcgagactctgtcttttcttttcttctttttttttttttaatttaaaagatagagatgaggtcctgctacatcacccaggctggttttgaactcctgggctcaagtgatcctactgcctcagcctcccaaaatgctgggattacaggtgcgagccactgcactggctgataccctgtcttaaaaaaaaagaaggggccaggtatggtggctcatgcctgtaatcccagcactttggaaggctgaggcgggtggatgatgaggtcaggagttcgagaccagcctggccaacatggtgaacccccgtctctacgaaaaatacacaattagccgggtgtggtggtgcacgcctataatcccagctacttgggaggtggaggcaggagaatcgcttgaaccagagcggaggttgcagtgagctgagatggtgccactgcactctagcccggcaacaagagcgaaactctgtctcaaaaaaaaagaaaaaaaaaagtgctggccgtaggcacctgggatacagcagtgaataaaatactgaactccactctcagagcttcctttctagctggggatggtggatggacaggaagtagctcacttcaatcagggataacacggaggaacagagccagtagggggtatgtatgaagtgatctgttgcaaggaattggcttacaggattgtagggccggctaagcaacttcaaaatccatacacagggcaccatcggaaagtgcaggctggagctttgggcgtgaactgaagccactgtctacaggcggaatttcctcagggaagcttcggctctgctctgaaaaccttttgactgattgcagcaggcccacttagattattattattatttatagagacggagtcttgctctgtcgcccaggttggagttcagtggcacgatttcagctcactgccaacctccgctgccccagttcaagcaattctcctgcctcagcctcccgagtagctgggactacaggcgcccaccaccatgcccagctaatttttttgtatttttagtagagacggggtttcaccatgttggtcaggctggtctcgaactcctgacctcagatgatccgcctgcctcggcctcccaaagtgttgggattacaggcgtgagccactgcactggcctattattattattattactcgagacagagtctcactctgtcacccaggctggagtgcagtggtgcgatcttggctcactgcaacctccacctcccgggttcaggtgactctcctgcctcagccttccgagtagctgggactataggtgcatgctaccatgcctggctgatttttgtatttttagtagagacagggtttcactatgttggccagtctggtcttgaactcctgacttcaggggatccacctgccttagcctccgaaagtgctgggattacaggtatgagccaccgccccctcagattatctaggataaatttccttccttaaggtaaactaattatagtctttaatcacatctatgagatatcttcacagcagcagctggattcatatttgactgaatgactggggacagcggtctagacaagctgacatgtgaaactgaccattgcaaccagagacataataaacaactcagccatgtggcatgttagatggtggtaagtgctaaggaggtaagaaaagtagagatgggttggagggatcaggaatatgtgggtgggaaggcctcggggaggtggcggcctttgagcaaaggcttgcaagaagtggcagagtaggccatgtgagtatctggtccaagagctgtccaaggagccggaagggtgagtgcaaaggcctcgaggccagaatgttccagaagtgttcggggaacagcttagaggccaaagtggctggagaagactgagcaaacgggagagggtgggaaaagagccagacttgggtgagaggcagattgtgtggggccttgtgggctgagatgaggattttggcttttagtcagagtgagacagtgaccacaggagggctctgagcagaggagggagatgagctggcttgtgttttaatgggatcacttttgttgggttttgaaaatatactcttggctgggcacagtggctcacacctgtaatcccaacactttgggaggccgaggcaggtggatcacttgaggtcaggagtttgagaccagcctggtcaacatggcaaaaccccatctctactaaaaatacaaaaattagccaggcgtgatagcggtcacccggaatcccagttactcgggagcctgaggcaggagacttgcttgaacctgggagatggaggttgcagtgggccgagatcatgctactgcattccagcctgggagactgagtgagactccatctcaaaaaaaaaaaaagagagaaagaaaataaaatatactttttttttttttgagacagtctccctctgttgctcaggatggagtgcagtggcgccttcttggctcactgcaacctgcgcctcccaggctcaaagattcttgtgcctcagcctcccaggtagctgggattacaggtgtgcaccatcatgcctggctaatttttgatttttagcagagacggggtttcgccatgttgaccaggctggtcttgaactcctggcctcaactgatccacctgcctcggcctcccaaagtgctgggattataggaatgagacactgtgcccagcctgaaaatatacccttaggggttgagagtagaagcaggaagatcattgaggaggtgactgcagtactctgggtgagaggtggtggggcattggaaggtagtgtgctggagaagagatggtcagatttgggatggatgttgaagctagagccaagaggatttcctaatgaatgtgagatttctgttttggactggataaggaggagggaaggaaagaagggaaggaaggaaggaatgtggggagggagaaaggagaaagaaaggagggcggaagaagaaggcaaaaacgacagatggagagacacgttaagagagaatctggatcgggcacagtggctcatgtgtgtaatcccagcactttgtgaggcctaggagggaagattgtttgaggccaggagttcgaggctgctgtgagctatgaccactccactgcattccagcctgggtgacagagcaagactttttgcgggagggcagagagaaggagaaactgaatgataaacctaaaagtgatctctcaacattcttagtacaaattaaaaataaagacttttgttaatagtgcgatcttggctgggtgcagtggctcactcctgtaatcccagcattttgggaggcctaggcaggtagatcatttgaggtcaggagttcgagaccagcctgggcaacatgatgaaaccccatctctactaaaaatacaaaaattagctgggcgtggtggcgcatgcctgtagtcccagttacttggtaagctgggcaggcaggagaattgcttgaactcgggaggtggatgttgcagtgagccgagatcatgccactgcactccagcctgggtgacagactgagactctgtcccaaaaaaaaaaaaaaaaaaaaaagtgcaatcttttcccttcctttgtataaaattctctagaatgggccagatactggttagcattggaaataggctctaatctatggtcaccactcaccagaacccctggaaccccacgtgtgcacaaatccagtttcagagaccaacacagtggtaggcactcttggccactgtgggagtgtgaggtgcagagacaaagccttggccttatatacttcagagcacactggggactctgtgaggctctaggtctatccttagtggatctaattttcctgccctggttctttgtgggtgtagaactattcccctactctctctcctaagcccaaagtggtgctggagggaagaggccgttctgaagcatttgcttctctgcatggagtctccctgctgtcttctctgatttcctcaggggtgggcgagatggtgtctgatgcacacgggcgccacgcacaagtctccagtggcccctgcatgcccactctgcctctttgtatcttctctgagcccaggaggctgccctgtgtgctctccatctgcctgcctgcctggtctcaggttcatgggaggtaactgcaggaatggggcagatgcaggagaatgaccagctgtcctgcacctggcctcgacctgtccacagcagcaaagctctctgtacctcttcccataactctctgcatgcagccttctcacaggctccaggccggactttgacacgcacctacttcagtccagactccctggatgcctccccagagccccagtgcattcctttcctgtagctgtcatgacaaggtactgcaaactgagtggtttaaaacaagggaaacgggccgggcgcagtggctcacacctgtaatcccaacaggcatgggaggatcgcttgaagccaagtgttcgagaccagcttgggcaacaaagcaagactccagcatgcctgactattgttttgtattttttgtagaaacgggttctcactatattgaccagattagtctcaaattcacggtctcaagtgattctcccacctccgcctctccgagtgttgggattacaggcgttagccactgcacagggcagggaccacaattttcaacacctcgccaatggggtctgggagctcaaagtttaagaattaccaaaaagccggtcctggaagatcccgggggttcacagggccagagaaacccatagacatgacatgaaaagggaatggggatcaaggcaaaggcacaggaggaatttgagagccagttcataggtggcggatgtatcaggggccggctgggaggggaacccaaagccccttcctgtcctgcctccgtgttccccgtgttggatctggccaatgcagctacctgctccttcacgcagccgctgaggacaaagccagatgagaggatggaaacagaggcctgacgcagtggctcacgttgtaatcccagcactttgggaagccgagaagggcagatcacctgaggtcaggagttcaagaccagcctggccaacatggcgaagccccatctccactaaaaaaatatatatgtatatatataaaattaggcaggtgtgaggcactctggagcctgaggcaggagaatcgcttgaacccgggaggcagaggttagttacagtgagccgatatcgggctacggcactccagcctgggtgacagagcgagactccatcacaaacaaacaaacaaacaaaaaagtccaggcgcagtggctcatgcctgcaatcccagcactttgagagaccgaggtgggcggatcacctgaggtcaggagttcgagtccagcctggccaaaatggtgaaaccccgtctctactaataatacaaaaaaaaaaaaaaaattagccgagcgtgttggtgggcgcctgtaatcccagctacttgggaagctgaggcagaagaatcgcttgaacctgggaggttcaatggtgcagtgagccgagaccgcaccattggcactccagcctgggcagcaagaacgaaactccatctcaaaaaagaaaaaacaaaaaccaaaaataaaaattacctgggtgtggtggcgtgcacctgtagtcccgcctactcggtcaccccgtctctactaaaaatacaaaaatggccaggcgtggtggtgcatgtctataatcccagctactccggaggctgagaggcaggagaatcgcttgaacccgagaggcagaggttgcagtgggccgagatcgcgtcattgcactccagcctgggcgacaacagcaaaactccgtctcaaaaaaaaaaaaaaaaattagccaggcgtggtggggcgcacctgtagtcccagctattcaagaggctgagggaggataatcacttgaatccgggcagtgagccaagatcgcaccactgcactccagcctgggcgacagagcaagaccttgtctcacaaacaaaccaaagacggaaacagatacagccatttcaaagacgactagaaaacctttttattcaccagagctcaatactcagggtcccgaccctgtgccaaaaactgaacaacttaaaatctgacgggggcccttcttctctttgcccctaaaataaaagctaggccattgccattcccatccgggtactcaaacccccttcttatcggcggttccttgacttgaacgttggaggttgaaaaacacaggaggaaaaaaaaatgtcctttagtcaactatcacgatttggggggtcggacgggaggtggtcgagagatatgcttctcgctgggggaaaggacccatcggtgatttggggatgggggcaggtaccgggtgcaatgggctgaacaaggggaagaacaaccagggggcattgaaaggtgtcagctcaccccacggctctccatccacaggtgagcctgcgaagacacggtgccctccagtgatacggtgctctccagagtcctactccgctcctgacggatgggtactgaggtcagggaaggaatgaacaggcgtggtccacgatgacaccgtggttctgcaggaggctgaagatggagaaggctggtcttaagtcgacatcccatcttgaagttcttgagtaggcacttctcagccagccttgttcagtatctcctaagggctggcttgggacagcaccgtggaatcctggaggttcaaaaatccaagaactccacaaggaacagagaagtcgaaggggcagggctccagtcaccagcaggccccacgaggacaaaagatccatgaaccggggcccagagggcgctacagggccgtgcaggaagggttcccgcggcaccaaggaccctcaggccaacgcccacaggccagagctccgagggctgacaggtccaagggggcggggctggcctggctcccagcagcctccactgtttcaggatccagccagggtggagttctgggggccagaaattccaaagggctgggtgactggaagagagagtttagggacttgggtgggatggaccaggagggtcaggggtgcgggtggtgagcatctcacgatgctcagcgcttgaccctgcgtccggccgagttgcgcccgctgcggcggtagagggactgctggccaccgttaagcgggcagtacttgagcgtatgggcctggtcaccggtggccccgcacacgggacacacgtagtgcctcaggatgggacacaccaccacgccatccggtgtcttcagctggtgtgaggagtagacgtggcgggactccccgttgtgcttgcagaagttgcacagggtccccaggcccccgttggcccctggcgcccccagcccctgatcctgccccagcggaggcccgggacttggctcctcaatctcttgggtctccagcctttgaccccgacttgcgatcagcgcccacaccacctggctcaggttgaagtagtccttccacatgtcgaagggtggcagctgcatggcaccaaagcaggggtggtgggccacaggagaggggctggggctgggggcccgtgggcaagggcaagagcagcaggcgtttcccagagcagaagggagctgcatccccttttataacgcccagagactcttctaagtaaaggtggagcttaggatttaaagggctcactccctgcccataacccccatctgactttagttcttcacagagatgtggaaggaggtcattcccctgatctctggtcccagctctgctgccaaggtgctctgtgacctctgggaagacacttccattctctgtgcctcagtttccctatctgttcaaagaaagtccatgtctgcaaatatcccccacccctaggctggaggggctgcacccttcatagacttcagagttattcctaatcatcatagcagccaggctgggcgcagtgcctcacacctgtaatcctggcactttgggaggctgaggaaagaggatcgcttgagcccaggacctctaggccagcgtgggcaaaatagcgagaccttgtctctacaaaaaataaaaagacaaaaataataataacaacatgacctgatttattttatttatttatttacttgagacggagtcttgctatgtcgcccaggctggagtgcaatggcacgatctcagctcactgcaacctctgcctcctgggttcaagtgattctcctgcctcagcctcctgagtagctgggattacaggcgcccaccactaagcctggctaattttttttttttttttttttgtatttttagcagagacagggtttcaccatattggccaggctggtctcgaactcctgacctcaggtgatccacctgtctctgcctcccaaagcgctgggattacaggcgtgagccaccgcacccggcctagtattttcattttacagagaaagatatgaagcttggagaggttaaggaatgtatccaaggtcacacaacaaggaaatggcagagtcgggtttcataatcactctgggaactgggaattgatgttaaaagtggcagaggaacttggcacagaacaatctcacttagaatgccccctcttgggctaggcatgctggctcacgcctgtaatcctaatattttgggaggctgaggctagagaatcacttgaagccagaagtttgagaccagcctgggtaacatagtgagaccctgtttctacatataatacaaaatcagctgggcatggtggcatgtgcctgtaatcctagctagtgaggaggctgaggcaggaagatcacttgagcccaggaggtttaggcttcagtgagccatgattgtgccactgcagtccagcctgggctacagagtggaccctgtctttttttttatgagatggagtcttgctctgtcacccaagctgtagtgcagtggcacaatcttggcttactgcaatctccgcctcccaggttcaagtgattctcctgcctcagcctcacaagtagttgggattacaggtgcccaccaccacacctggctaattttttgtattagtagagatgggattttgacatgttggacaagctggtctggaactcctgacctcaggtgtgattcacctgcctcggtctcccaaagtgctgggattacaggcataagccactgcgtctggccaaccctgtctctctaaaaaaaaaaaaaaaatagccctttcttggccccatccattgtcttaaatccttcctggcctttggaacgagcaaaagcctcatctcccgcccaccgcacctggggttcttcttccacccacagtctccatgggccaccttgatattcaacacatagttactgaggctccatattgggtgctggaaattcagcagtgaccaaggctaccttatgcctgcttcatgaacgagttcaggagagcgaccagtaaatgagaaaacgctagactgtaaagacctgctggcctgtgaaccgggtgttctaagagtggctggctcaggaatgggacttggaagctgagaccactaagaagaatcttccaggaagaggaacacaggatatggaaactgtggctgggtgtggtggctcatgcctgtaatcccagcactttgagaggccgaggtgggtgggtcacctgaggtcaggagttcgagaccaacctggccaagatggtgaaaccacccccatctctactaaaaatacaaaaattagcaggatgggcacagtggctcacgcctgtaatcccagcactttgggaggctgaggtgggcggatcatgaggtcaggaggttgagaccagccttggcaacatggtgaaaccccgtctttcctaaaaatacaaaaattagctggcgtggtggcgggtgcctgtgatcccagctactcaggaggctgagacaggagaattgcttgaacctgggaggcggaggttgcagtgagctgagatcatgccattgcactccagcctgggtgacagagcgaggctccatctcaaaaaaaaaaaaaaaaagtaataaaaaataaaaaataaaataaaataaaataaaataaaataaaattagctgggcgcagtggtgggtgcctgtagtcccagctacttgggaggctgaggcaggaggattgcttgaatccagaaggtggaggttgcagtgagtcgagttagggccactgcactccagccagggtgacagagtgagaatccatctcaaaaaaaaaaaaaaaaaaaagacatcctgaaatttgggaacagcaagggggctggagtggctagaatggagtgaagatcccaggatgaagccagcatgatttgcagaggctggacaccctcagactctgcaaatctcccttagggcatgttttggaattggtgagggcgttttgagtttgtcaccgtgattggaggtgtggctggatttagtaggtggggaccagggatggcagatatctcgcagttcgcaccaccaagacctgttctgagccccacttaactttccagtgtcccactgaacacccatctaggtagaaaaacccatttataattatccaaattcagagcctagctatgttttatatataagcactaggtgctttttgcattattttaagataacactcatttttcctggaatgcaaccactgtgttcattctggtcttcaagctcttggtttttctgagaactttattcagttattcaccaattctagaagccacaacactcaaggcaatgctgcttgtggtatctgtctccaaacaacataccatttgtttgtatctcattcatggtgaatctacacagagaggctagtgtctgccctgctcagatgatttttggagtgtccatgcctgagcatttatacacttacatagacattattttattataaattactgtctttttattttccctttatattttggttaggacacgacacgatatccatttttgaaaataaaatttgtgactgggcacagtggctcacgcttgtaattccagcactctgggagaccaaggcaggcgggtcacttgaggtcaggagttccagaccagcctggccaacatggtgaaaccccgtttctactaaacatacaaaaattagccgggcgtggtggcacgcacctgtaaccccagttactctggaggctgaggcaggagaattgcttgaactcaggaggtggaggttgcagtgagctgagatagcaccactgcactccagcctgggcgacagagcaagactccatctcaggaaaaaaaaataataaaataaaataaaatttgtatgttggtgagctatattacctatgagtttaattttcaaggtcctaaagggtaattgcaaaatgttatctataatgttgggggtcctctcttggccccatccattgtcccaaattcccattcctgtaatcccagcactttgggaggttgaggcaggaggatcacttgagtccaggaggttgagaccagcctgggcagcatagtaagacctagtctctataaaaagtacaaagaagttaactggtgatgcatgcctatagtcccagctacttggaagcctgaggcaggaggattgcttgaacccaggaggctgagacttcagtgagctgtgttcgtgccactgcactccagcctgggtgacggagtgagacctcatctcgaaaaaaaaaaaaaaagatcatctatgaaatgaagacacaattgagacaataatcataggcacactcattactgagcatctgtgggctggcaccatgctcagggcccgacctgtgtcatctgtaaatcctcccagatcctgtcaaatagtctgttaatggtcctgttttacagatgagcaaagggagacttagaggggctcaggagcttttccaaagtcatatggacagtaagtgttagtctgggctgggcacagtggctcacacctgtaatcccagcactttgggaggctcaggcgggcagatcacttgtggtcaagagttagagaccagcctggccaacatggtgaaatccggtctctactaaaaatacaaaaattagccgggtgtggtggcgggtgcctgtaatccaagctacttgggagggtgaggcaggagaatcgcttgaacctgggaggtggaggttgcagtgagcccagatcgcaccactggactccagcctgggtgacagagcaagactctgcctcaaaaaaaaaaaaacaaaaaaaaacaccattaaaaataaaaataatgttaaaaaaaaaaaaggtgtttctccggagctgaaacccaagactgtttgaccccgaccttggacatcctcccaccccctgtagaaggagcacgcaaagcccgctgtgagcgaagaacctgcctaagaccccaagggaaagcagcagaccctgggggtcttgcagtgtgtagcgacagattgaggtgggaagccaggaaggatgggggtatttgagccaggtagcttttcagatacagagcagatgagacctgtcagccaccgatggacatactcaagagcagaagagactgtggtcggcagaatggaagaacagtactcctggggaggcaccacgacgggcatgggggtccctgtgctgagtgctttctgcaaagtcacagccttgactttcctcgtgggaggtgtgagttccctgtgtgtgcagggcctggacccagtaacccagtgacagtggttacagctgtggcatctgcgggatgtctgagaatgatgtaaggagaggccgttcccaggctccatggctccccttaacaattgcacctattgttcggagaaccccagatactgctggcttgggagtttttttttttttttctccttattgttttctccctaattgttttcttctaggattctgttatttgggccatggctgctttccaccccccaactccagtattattggatgagttgattgaaagataccccttatccttcttcagacaagctctctttccctggtgtggttgctgctctgagttaagggaacgggagatgatactgactagaaattcatcagccccggtgtttactacgtcctaacctccgcccccaccccaaggccacgaccgctgtctgctaacctgacgccaaggtgccctgtttatttgtgagtttccgtctccgcctgatgcctggcagaaaatagctcttgctgggggtccagagacgagtggggaggggaaagagttagaaaccccgagaaagtgtggggagaaacacgtaaatgggcagcagtgactcccagaaagaccgagggacccgctgcgagaccgagagacctgctcatgcggggaccaagacaggggagatgaagaccagggggagagagaccccgagggccagcgaggtcaccatcatcatcattgtcctcatggtctctgctgcgtgcttgcctgtgccatgtcattaaatccccagacagccttgtcaagtatcttgtaatatcctcatttcacagaacaggaaacaggcttggaggtgacatctgtcatggagtgattcagtgaggctggactgaaatccagatctggggctgggtgcggtggctcacccctgtaatcccagtacgggaggacgaagcaggagggtagcttgagcccaggagtttaaggccagcctgggcaatatagtgagacccccatctctaaaaaaaattaaaaattagctggacttggagtcatgcctgtagtctgagctacccagaaggctgaggtgggaagattgcttgagcccaggatgtcaagaagtgaccgtgccactacattccagtctgggcagacagagcaagatcctgtctctaaaaaaaaaaaaaaaatatatatatatatatatatatatatgttaaaattatatgttgtatatatttatatagttatatataagtaaatatatgctatttttatagaattatatgtgatttatatatatttatatttttatattacacataatatataacattaatatagtaatatatattcataaatatatttgcatttacaaaatactatatatcaacattgatgattaataatatattaataattatatatttataatatataaatattatcaatataatataaaaggtatatgggtacttatataaaatataagatattttatatcttatatataagatattaaatatcttatattttatatattaatatatattaatatatatatttatatcttaatatataatgttttatatttatatatttatatattcataaatttaaatatatatttataatttatatttatatatttattacatataaatatatattaatattaagacacatttattattaaaatatgtatttattaatatttatatatttatatgtgtatattttatatatttatgttatatttatactttttatatatttatatttcatatataatgtacaactgtaatatttatatattataaatttatatatataaatctatatataatataatatatatttatatataaaatataaatatataaaatatatagttatatacataatataaaaatataaaatacatttatatttgtttatattttattgaacatgaatatgataatgtatatcaaaattatatatataattggccaggcatggtggctcacgcctgtagtcccagcactttgggaggagaggcgggcagatcacctgaagtcgggagtttgagaccaacctgggtaacatggtgaaaccctgtctctactaaaaatacaaaaattagctgggcgtggtggtgggcgcctgtagtcccagctactcaggaggctgaggcacgagaatctcttgaacctgggaggtggaggttacagtgagcagagatcacaccactgcactccagcctgggtgacagagcgagactccctctcaaaaaaaaaagataatttaaaaaattatatatgtaattatatataagttaataattatatacatatacaataataagtgttatgtgtatttttcaggttgggctatgtgctatacagaagaaataaagggggcagtggttaggagcggccttttggaagaggtaccatttgagaagagtcttcacggatgtagaggagggagccttgttgatacgtggagacgtgcgacccagacagagggagcagccagtgcaaaggccctgaggttggaccatgactgggtgttcagggaggcgagtgtggctccagtggattgacagggagaatgggagggagtgagcgagaatgcaggacccggtgggccacagtaaggacattgggttgtgctttgagtgaggtgggagtgatgggcgggtctgagcagcagcggggaatgctttgactgaagatctagcaagatttctctaactgccctgtagggggacagacaatgggagttgagggcagaagctgagagcccagtgaggttaaggcaagaggtgatggtggctggactagagggaagggagagagaaagtgtcgaggagtggctgggtgttgattaccgcacagcagcagaatgagatttctaaaatataaatcagatcgtgtcactcctcttgcttaaaacttactctgattctctattatcctcagaataaagtcccaaaacattactgtgacctacaggctcctaggtgatatgtgtcccctcttctcaccttccctgggatctctatgatctcattttctattgcatttggctccagttgctcactcctctgtagccacccaggtgtcatttctctctctctctcttttttttttttttttttttttgagacagagtctctttctgtctcccaggctggagtgcagtggcgtgatctctgctcactgcaacctccgcctcccaggttcaagtgattcccctgcctcagcctccggagtagctaggattacagatgcctgccaccatgcccagctaatttttgtatttttagtagagacggggtttcaccatgttggccaggctcgtcttgaactcgtggcctcaagtgatccacctgcctcagcctcccaaagctgaggctaaagggtgagccgccatgtttttaaaaatatttgcctaaaaatgtttttaaaaacatttgctatatcatggactgaattgtgtctccccaaattcatatgttgaagccctaacacctaggaccttagaatgtgactatatttggatataggaccattattttgtatttatttatttattaaaaaaatttttttttgtagagatgcagtctcactgtattgcccaggctggtcttgaactcctagactcaagcgattcactggccttggcctcctaaagttctgggattacaggtgtcagccaccgcatctggagacagggcctttaaggaggtaatttaaaaggtggctgagtggggctcggtggctcacgcctgtaatcccagcactttgggaggccaaggcgggcagatcatgaggtcaggagttcgacaccagcttagccaatatggtgaaacccgtctctactaaaaacacaaaattggctgggcgtggtggcacacgcctgtagtctcagctacttgggaggctgaggtaggagaatcgcttgaacctgggaggcagagattgcagtgagctaagatcgccacgctgcactccagcctgagtgacagagcgagactccttctcaaaaaaatacaaataaaaaataaataaaaggagtctgttagggtggactctaatccaatctgactagtgtccttataagaagaggggattgatggtggctcatgcctgtaatcccagcactttgggaggccaaggtgggtggtcaggagatccagaccatcctggctaacatggtgaaaccctgtatctactaaaaatacaaaaaattacctgggcatggtggcgggcacctgtagtcccagctacttgggaggctgaggcaggagaatggcgtgaacccgggaggcggagcttgcagtgagccgagattgcgccactgcactccagcctgagcgacagagcgagactctgtctcaaaacaaacaaacaaacaaacaaacaaacaaacaaacaaagaagaggggattgaaacatacaaagagacactagacactctgtgcacagaggaaaggccatgtgaggacccagagagaaggcagcgatttgccaaggagagaggcctccgaagaaaccaaatctgttgacaccttgttcttgaactcctagcctccaaaattgtgaaaaaataaatctctcttgtttaaagtcacccagtttgtggtattttatggcagccgtaacaaactaatacaatatacattcttaaagttatttttgcaaggtataaaattctacattattccttctttccctgtgtacataagatatttaaaaatatataaaattctacattagacgttctgttctttcagcacattgaagatttcattttacactcctgtgatttctactggtgctgttgagaagtcaccatttagcctaacaaccttccatttcctcctgtggtcgctttaaatttttttttttttttttgggatggagtgttgctctgttgcccaggctggagtgcagtggtccgatctcggctcactgcaacctccaccttgcaggttcaagcaattctcctgcctcagcctcccgagtagctgagattacaggagcccaccaccacgcctggctaaattttctatttttagtagagacgagctttcacatattggccaggctggtctcgaattcctgacctcaggtgatctgcctgccttggcctcccaaagtcctgggattacaggcatgtttggaatctgctggcctcctctagttgtgatctggtgtctttcatcagttctggaaaaatttcaactactctctcttcagatctgatctctgtccccttctctctctcttttccttataggattgctaatttttgtttattttcagtggagatgaggttttgccatgttgcccaagctggtctcaaactcctagactcaagcttctcaacgtgctgtgattacaggtgtgagccaccatgactcatgactgttttaatactggtgtctgatctcccagcatctaaagtctgagccacaccttttctgttcttttgattcttattggtgtcatatttccctgtgacctgattatgtcggcctgatgattattgacctttgcattttttttttttttttttttttttttagtggagtctccctcttttgcccaggctggagtgcaggggcgtgatcttggctcgccacaacctccacctcctgggttcaagcgattctcctgcctcagtctccggagtagctgggattacaggtgcgtgctactacggctggctaatttttgtatttttagtagagacggagtttcaccatgttggccaggctggtctcgaactcccaacctcaagtcatccgcctgtctcggcctcccagagtgctgggattacaggtgtgagccaccgcgcccggccgacctttgcatttaactggggaatttcccctgggcctgagttgaatgcatggattccagggtctgtgtttgctttggttaggcacccctcagacacttccagttacagcctctccaaacatggttctggtttcttgttccttgactcatccagttatctacactgggggtgtcaacactgttcttgggccattctgaagccacaacttctcagggacttttttttcttccttatcccattctgctcagtgttgatgctgctacctttggagttgggacttggagttgggacagggacaggtttaggtctggctcgaactcactcagcagaaagcactttggggtcccagcttagtgaaaggagggtctttctttgcacttcctatctaagccaggccctggaggccacagtactgaaatccaatcatatgctcccagcaaacccgttgaagaaacaaccaccttttttgtgttcttctagccaccctgtttacactgcacattttacaggtgttatgtcctgtctttgcatttcatcagtgctttcttttaactttttatttggagagaattgtaaagtcacaagttgtcataataaataatggagatcttcgtgtcctttcctcagttttccctgatggtaacattttccacaactgtagtacaataccacaaccaagatatagacatcgatacaatccactgatgttgttcagattttacacttatttgtactcatttgtgtgtgtgtacttgttttttgtttgtttgtttgtttgttttttgagagagagtctcgctctgtctccaggctggagtgcagtggcacgatctcggctcactgcaacctccacctcctgggttcaagcgattctcctgcctcagcttcctgagtagctgggattacaggcgcctgccaccgcgctctgctaatttctgtattgtcagtagagacagggtttcaccatcttggccaggctagtcttgaactcctgacctcgtgatccacccgccttggcctcccaaagtgctgggattacaggcgtgagccactgcgcccggccaataaatgtatttttttaaatgactaggtacctcctgagaaggatgcagctccatttccctacagttggaagctcattggttaagagaaagaacagtgaagagaaaatggggttgagatggccgcagctttctggagagtaaagctgagtggtcaattacttctggccaactgagggccctactctgctccaaaccgaaaccataatcccccactgtggccactccaactctagccagtaactcaccggtctctttcggttcacgttgcctacctggaggtgcttgatctttccacctgcagggagagcagctgagaaatgccaaagcatgggtcctgttcctggcttgtctgtggaactacgggacacccatgtcttacctctccctcctcttcttccttagggatctgagcttctggttcagctgagagtggggtgaaggtcaagagggagatccccgatagtaaggttggaactgaggatgaggataatggtgaggcagggggctatgagaattggcactggtcatacaggtggtgaccaagaaaaaggacagagaaggccatagagatggaagaattgaaataaaacgagcgtgggggccaggcacggtggctcgcctgtaatgccagcactttgggaggccgaggcaggtggatcacctgaggtcgggagttcgagaccagcctggccaacgtggcaaaaccccatctctactaaaaatacaaaaattagccgggcgtggtggtgggtgcctgtagtcccagctactcgggaggctgaggcaggagaatcgcggaggttgcactgagccgagatcgcgccattgcaccccagtctgggcgacagagcgagactctgtctcaaactaaacaaaaacaaaaacaaattctggagagtgaaaaagatgggggggaaaatcaaaccaaggagacagaacacacacgaagacagcaagtgagattatacatgcacgtaaaaacagagatggacagagagagagggcgtgcaaccacgtggaggaggtgtggcgcctctcaacatctattccactctcctagcgcaccttcctgcgactgcagcggctggagggctcaaaactacgtttcccagaatgccttgtggctgcgcatgtggccggaggttaggttccaccaatcaggtgcctccgcgggaagcttgaatttcttaccgaagtaagctgggcgagaggcagcccgaaggccagtgcagatcccggcgagaggctgcggcggtggagccggctggcggcttcctgatcgcgcaggaggagcagcggttcctggacggccctttctgagcgctggatttgagaatgccctggaggctcagcctagattctgtttcttctgagaggctctgtgtcccttaataagtcctttttgcttacactgtcccaagtgaattctgttcgcgcctctgagcaacgatgggtacacagacagggagaaatagatgcagacacggacagagacagggaaagtgattcagggagacacacagagaccccatccctgcgaagagacaaggagaaagacaattctgcagaagtggggtggagatgcaggaaaaaaaatcaatgggagaaggaagacctggttagacagacactcagagaaatacggaagataacaggcagagaggagtgagaggcaagggcaggtgggccagaaacagggacacggagacctcaccagaatgctggcgtgaaggtgttggttgagaggcctcattttaaatatttatttatttatttatttagggacggactctcggtctgtcgcccaggctggagtgtagtggcgcaatctcccctcactgcaacctccacctccgggttcagcaattctcctgcctcagcctcccgagtagctgggattacaagcatctgccatctcgcctggctaatttttgtattattagtagagacggggtttcaccatgttggccaggctggtctcgaactcctgacctcaggtgatccgcccacctcggcctcccaaagtgccgggattacaggtgtgagccaccgcgcccggccggagaggcctctttagagaacagacttctctgaaggcatggcagttgaaggcaggagaatggaggggactttggagaaatctctgacttgctagactctctgattttggtggcagcgagcatttgcctggcagaacgtctctttgtcccagcacctattcccagcccaaagcttcatcagctctgactgcggagggggtagtgcccctgaaagtgtttcccattctccatcacttgcccctgaggccttgtcccccaaaaccagcccccacttgacagcttggtaggagtgagaacagtgactcaactggttttaatgtgtgaggcagattccaggagtagtgactgactgaggaactaagaggagttgggggtggcgggagggacagaaggactgcaaaacagggacaccaacgaaaaaagagagggaaacgtagggacagaaagcagggagcgtgtgaggcagggaaagtggagactgagaaactaggggcagagagagggagggatccaggggctgagagaggggacagaggggagacagaggtggggggcagagggacagagaggaggggcagaggagggggacagaaagacagagagggggaggatgaacagagagaaggagacagaaggacagagagagggagacagagggacaggggggacagagggacaggatggggagcagagggacagagggagggaggatggaggaacatagagaggggacagagagatggggggcacagagggacagagaagggtgacagaagggcagagaggaaagggatacaggagttacgggcagtaagctgggcatgccccagttgggattccagatggtggacgcctcggctcctttaaccagttctcctggctttttttgttgcccctcagatttctttttgttttcctccacctaaggttgccaggtaaaatacaggatgcccagtttcatttgaattttagataagcaacaattcatattgtagcatacgtattgcccacatattgcatgggacatttttacacttttttttttttttgagatggaattccactctgtcacccaggctggagtgccatggtttgatctcagctcattgcaacctctgcttcttgggttcaaacgattctcctgcctcagtatcccaagtagctggaagtacaggcgtgtgccaccacgcccggctaatttttgtatttttagtagagatgggggtttcaccatgttggccaggctggtctcaaactcctgacttcaggtgatctgcctgcctccacctcccaaattgctgggattataggtgtgagccaccgcgcccggcctaaaaagttcttttaatctgaaattcaaatgccactggacacacagtatttttatttgctaaaccttggcaaccttatctccgtcactttccagtttctgcctctttttcattttctatttgtgtgtgcctgcctctccctctcttctagttcatctccaccatctctattctccttcctctgttttttatttttgtttgagacagggtcttcctctgttacccaggctggagtgcagtggtgtgatctcactgcaaactgcctccagggatcaagcgatccttccacctcagcctcccaaggagctgggactacaggcacgcaccaccacacctagctaacttttatgttttttgtagaaacagggtttcgtcatgttgtccaggatggcctcaaactcctgagctcacgagattctcccacctctgcctcccaaagtgctgggattacaggcatgagccactgcgcctggcctccccgtcccctcttaatgacctggctcctctcatgtgtagagacctctcttgagacacccccaccaggtccctgcctaggccccttcctccctccttcccccttcccagccctctttctagggctgtctctgtgctccaggcaacttctctgtcttctttctccatctctcttctcattcagatcccccacctttgcaattctctctatactcccctcaccccctgcccagaggagaaggtttgggggctttgagggagctaggaatctcccattactcaccttcatcctgacctcatctcctttcctttccatttcctgggccagagacatcatgagggttttccaaagccacacagcagaacagaaacacccgccctgtccctccaaatcccttccaatttcccagcttcttggtggaaaattcctttactcttcctgaaaatggcctggcttggcaatgtttctgaataccaggcaatgcttgagggtcacaggccaggaccagaggcgcctgtggctcatgggatggtagacttttggacacctactatgtgctgagagtgagggatatggcctgtgggctgtaaatacaacaacagtgatgtgtcctgggcatcaccatatccctaggcccagaacacagtaggtgttcaataaatacctgttgaatgaacgaatgaatgagtggatggacacatccccagcaggtggagcctcatctccatgtctgccctcctcttcatccctatcgctcttgcttactttatcctagcctgagtcccccttcttccatccccctctgttgggcttgtccttttctggagtcctgttattgttatttttatcagctggagggggtctctggtgactaccatgcgctgagcgttttctctatgtcaggtactgaaggggtgagtgacatgtagaatccttctggaatattccagaaggcaagtacagctttctagggcgttttccagatgtggaaattgggagccagggagaggaagagaaagtgccttgggtcacaccagaatccaagcgtctggcctcaccccacccagcctccttggccttggtctcttgtttctctgtcattatctgccaagctgcatctctgacacctccaaaatgtaaggcaattacttatctttttttttttttttatgagacagggtcttgctctgttgcccaggctggagtgcagtggtgcaatcacagctcactgcagcctcgacctctcaggctcaagcgatcctcctgcctcagcctcccgagtagctgggactataggcatgtaccaacacacctggctaattttgaagttttttgtgagacagagtctcaaactcctgggctcaagcgattctcctgccatggcttcccaaagtgctgggattacaggtgtgagccaccacatccagtcaggcaatttttttttttttttttttgagacggagtctcgctctgttgcccaagctggagtgcagtggtgcgatcttggctcactgcagcctccgcttcctgggttccagtgattctcctgcctcagtgttctgagtagctgggattacagccacctgccaccatgtccagctaatttttgtatttttagtaaagaaatggtttcaccatgttggctggtctcgaactcctgacctcaagtgatccgcctgcctcagcctcccaaattgctgggattacaggtgtgagccaccacacccagccaggctagtaatttttaaatatttgctcaggggttgcaaacgtccagagcctaggcatgtgagataaatgagcagtgccggtcaggaaggggctaagcctctctgccctgggtgagtggcagtggctgccccaggccagcccattatgggcaggtggcaattgcaatcaaagctatcacatggcatttctcaagagggtcttgaaacccatgttttcaaaagtctcccaatgtttaaatgctggcaacaattccacaaaacactgtttgggtcaaatgaaattatgggtaccgcacctgcctgttggccgatggtttgcaacctctgaattcatttgagtcccacgtgtcaggttttgtgttaagaagaatttcccaattccagtagactgtatgctccaaaaagccagagatacctgggtctgttttgttcattgctttatcttcagcacctagaacagtgccttatgcatcataggtcttcagtaatcatttttaaaaaagtgaatagtgtatcgatccaagcataagccatatgatgtagaaataacaatttaaaaaatccccatgttacagatggggacctgaaggctcagaggagcaaaggactgagggtaacacagcagcacggggatctaaacccatagctcacctgactcgaaaacctccaccttggcctatcctgattctacctggcgttgtgtatttgcagggctgtgtgtggggatgtgcgtccaagacaaaagcctgtttgtgggactgtggctctgcatatgtgtgtggtggtggtggtgtcggttctcctgactggacactgaggccctggaagctacattttttttttttttgagacagtcttgctttgttgcccaagctggagtgcaatggtgcgatcttggcttactgcaacttccgtctcccaggtttaagcaattctcctgcctcagcctcccaagtagctgggactataggcgcgtgccaccatgcctagctaattttttgtattttagtagagactgggtttcaccatgttggccaggctggtatcgaactcctgagctcaggtgatctgcccgcctcggcctcccaaagtgctgggattacaggcgtgagccactgcgcccggcctctggaagctaaacttgagcacctgcttctcttcaatcacagttactccggatgctcaccccgtccagagagaacagtcctccctccccagctcccccatctgggaccatcctcaggggtccccccaccctcttcccctaaatgcccagagccctgggggaaagggggaaagaatttaggatgagggtggaggtgcagggaggagggagagggaaggggatgggttaagaaggagtgtgtgatgtcaagcaaaaaagacaacattagacacagatgctgagatggcgtttatcgcggcaaaaaaaggtgaagtcgccgaggggaaaggggtggggaaagggggtgtggtgggggctggggtgggggccatggaagctaatacatggtgcactaggtcacacaacggacactgggggtgggtgagtgggtggggtgggcgtggcccaggcatggcaatgtggggagtgggaggagacggcagtgcaccccagccaggagcttctggaggtggtgggcaggaggcgggcggcgtctctggtcgcagaggatggaaggaatcagttagagggggttgaatggaggcactggaggcatggccacattccaagaaatggaatgaaggagtgggacagcaggcagggggccagcctggggcctgggccttttaatctaaggactggggagaaccaagggaccttagaggtcctccagtcctccccatattccaagagggagaacaagcctggagaggaggctaccttaaggtcctaagaaggatttagcaatcggttctccaaagatggccctgcagcctcccctgtcccccattcttctgctaccctgtctccaacagagaaagggggaagagaggttctagctcctctgactccaccattatctcactgaggctcctcagggaaattggaggatgaatccatttcacagaaggggaaaacggaggcatcctcccagactacacctttccacacctctcccaccaccctgccggggaatctatgcaccccatccctctagagtaatactgatagcttgaaatccttagcgatggggacaggtgaggggacataccttaaaattctcccaaatcgacccgggatgtgggccatgcctccagtggcctgagatgccaacataaagaaaagaaaaatgactccccacgtcccctggctcaaacccagtacaaaagtgactatttacaatgaaggcgtggggagtgtgtggggggcacacgaaggagggggtcagagtgagcgctccatttgagggaggccacgcccctggacccgccttttaaagggacaaagccaaatagcatagatatttatagaggatgtcaatccccagggtggggcagaccctaggggtgagggatgggggtggggcatgggatggggtgcgggtggggaggcatgggtggtgggaggagatggaggaaaggtagcaactgcccctagcctcccccctcccccctgccggacacacagttttccgtgggatgaacacagaaagggttaatcaaaaagagttcgatgagcgagtctgacggtcgagtggggcgggctggagcaatgaggccgcaggtcccggtggccggtggtgatggagtcacttagaagatgagaggttggtggttttggggggagaggtggggtagggaaaggggtgggggagggggggttaggcagtccccccccagttatctctgggagacaagtgtcctggactggttgagaagggattaaaaaccagcagccttcaccaccatgaccccacagattctcttcccatttccctccctgccacccagcaatctccaatgcaacttgcaggggacactaagacagaccatacacaccagcagtggcgcccggagacaagccctctccaaccacggcgtggagacagctgaccacagtgcaaacggatcgcgatagcagggctgggtgttatcaccccagtaaaccagtgtccctggctcgcctgtgccccagcttgggtatcgcgatcccgttctccccatcgtgacatccagtccaggctttcaggacagcgagcccggtttccaggcaggtgcttgtcgaaggcctggctggctgtaccgacaggcgggcactcagtcagcagcctggacgccccaactgccatcctcatcgccactcttgttaatacttttgccactgcacagtctatcacagcctctaatcccggtcctgaaacagcaatcatccattcagggggactcctctcattttccaaacaattggccaccaatcaaaacaaagtaagaaggaggatgtgggatggaggaacagggaggagaaacagaatgaggggatattgaaggatttggtggtccagaggggagaggaaatacacctcggagataagcgacaccctggtgttccaagtagaggtccccaaccatctataggtcggcttttatcaacatccacttgggatacccataattcccaactacaagtccagggtaggcgttagggcagatagaaacggcaaaatcattgtcttctgatcaccacccctactaattattgcagtgaagcctccttgcccatgtagaggtggctgggacagggcagaagaaggtggctgggcaggttggctcagagccccctgagatgggggatgaaggaggttaatttggcacatcgaaccccctcttctcataggagctttgaggtccttctcttgaatccagttggtaccgccccttgggctagcagaggaggagttgagcttgtctcctcctccccagtttccatagatttgccaggaagttggcaagtgggattctccttggctggtggaatttggggggacccaaaaggataggggtaagttgaaaaggagagcttttttctgtctttttttttttttcttacaaagattctaagaaaaactcagggtgggagggctgtggaagggggacccaatttagctccatgtccacacttttgcaatgcctcttagggacctcctcaaagagaaatggtcccatttcctcccctctatccaaggtcctctccccccagagcggctcagttccaaggaagtttggcacttttttttttttttaaatggggaaattggggagagagagttgagacatttgaggaaaggaggaagacagacaaagactaagatagagacaggacagaaaacaatgggaaccacacggaggaaaaaaaaatagaaagtcatagggagccagacaaagaaagggaggaagacacttggagaaggtatgggaagctagagggcaaatgagaaggaatagggagataatccaatgcagcaaacacttattaagcacctactgggtgctgaagagaagggtgcaaggaggccactcagagactctgagatcggattggctaatagggagacggggaaaaaaaaagagatgatgggtttttcaataatcctcatccctgaccccacatctgtgtcccctctggacaaactgcagcacaaaagattgaggtcagattgcagaagggactttcaagagatggcaaagatggtggagtgagtttcccaaggtaaaatggggaaaggtgtggctctctgctcaccaacatggtgagtgaactagctcactgagctagcaaagtatacctttcagatcaccctggctggctgggtagggggtccccaagaaatatgaatagggaggggttgttacacagacaccccaagcaaacacttttcaggaggcccagcctccggagatgtgtctgtgtgagaggagtcctggacccggctgattgggacccagactccagtgaatgagtttgtagaaagcggctgccaagcggaggatgcaaatgatatgcaaatgagttcattcagatcccacctccccagtcccagaccttacttcactctccctggctccttcccttcctcatagggtcctggggggctgtagggggatattccagctagatactgtaatactcgcgtgcgggtagagatactgtgaaatactgtaaggtcttttgagaggtggaggggagcaatggcccacagagccgcccccacctctaaccccaagagcccccaacggtagtagaagatatgtacaaagttacatcaagaattgttttggcactcagatctccatctgggttcagtctggagattaggggtggggcaacaacaatgggaagtgggggataggggaggggaagtggggcctgcctcccaccctggagatgacaagggcatggaaaaagtcaccccagtgcccaagttacagcctcccatcgggtggaagggctggggtgggaaattcagtgcaaggtacctcgaaggctattgctttctagggattttcacattttgatttgggggtggctctctagcaagggagagggatctcctaggctttaggggcaggaattgtctctgtggcttttcttccctccttttttaggagagagacaaggaggctggatttcccccaaagtcatagagaagaaaagggtttggaagacctaggaggcggacaaatgggggagagggtgggcatggggcgcccctcccccagagatgctgatgatggaaccagggcactgggcgccctgctttgggttggagaaagtggaggtggtctccaaggaagagagggagatgggtgggggtagagggaggtctcagctatcctagtctacatggttgtcaggccctgaaatctcagtctgccaacaggtccttagagctgaccacagccacagcactcagggagccactcctaaaccaactctcaaggccgcctggcttgtcagactccatcagaacattctagttctccagagcccctggtgagcacaccaaaacattctgatccatcagacatcaccgaagtatgccagcttgctggaagccaccaaaccaatctaacctatcagaccacacgaagcattctggcccaagggaccctactatggctcactgaactctacacctggccatactggcctgacagagccaccacacacttggctcacccgattcaatgaaacaaagccacgcagacacaggcatgcacacaaaaggcaggggtgggaagggaggtctttaacagtagtttgcactaggtccatctcccacccctccctccagggcgagttcgcagacttgacgtgtttgaatggagatgaccctgacaatattggtttttttccgttagagtcctccagattggatccaagtcccgtgccttattctcttcctaggaagacccccaggccaacacccaccaaagaagggtgtggagggagaaggcaggtcagagactggtcactgtccaatacaggaagtacatgcttcagcctaatgacatcacaggacgtgacctctaggcatcaccggaagtacaccttcccatgatatcaccaaagtgaccttcaaggaagaactcattgagacatcacaggaagtacctgctcccttatgttcacaggaagtaacctctgaggaactgcttcctgtgacatcataaggggtgcccagaagcaccccagaaagtactcagtgacatcacaacagagaccctcattgccattactctaagccatcagagataccacaccaagttgatccagcctcttgcaagtcttgcccacaggactggcccaatcccagagctggcatccttcccagcagcactgtccctgcccccccatacaacctgacaacaaaagagtgaacattcccacctaggagggacagctccagtgggaggagagtagctgagaagatctgggaactctggggtccttgctccaaatgccccatttcagctcagacgcctctgctacctctactcccatggcttccctcagatctagaactgaaagcagagaggtggggtgttgtgttttgggaaggcccctcattctgggtgacccagaggctccctcccctcctcccatatggaaacaaaaacttataaagggggaaaaaatccttaccaaaaaaaaaaaaaaaaaaaaaaaggagggaaagaaagagaaaataacgctttgttttctattaaaatcaacaaaatgcaatatatacagatatcacacagacctgggccctgggacaggaagggtcaggcccagccaagcacagggagggaggaaggaggggtcagttccgggctggggagggggcttctgagcccccttcccaaccgtcactcaatcctgcctatgactaccagaaggggagggtgcagtcgggcctaccccagccccatcccaagaggagcaggactacaccaagctgaggtcaggagttgggggggaggaggagagggaagaggaggagatgggaggagagaaaagggtgggagcacacaccacaggcctcatcccactttctgggggtttgaggccctcactccctgctcgtaggtgacccgctgactgatgaggtattgagcggcttgcgtggccgcggggctgcccgtgatggtgacccgccggttccgcgtgcctggcaggaactcgcccttcttggagatctggatgcgagcgcccgtcagctcctggtactccaccaacgtcttgccccccttccccaggatggctcccaccaggttctcaggcaccgcaatctccaccagctccttggcactctcagccgccagcttctccgccgtcaggaagcccccggccgccccggccgcggctgcagcggccaccagcgggccgccccctccgcccgccccgccgcccgccccggccccgaggtagccgttggcggctgcggccaacgcaaaggaccccagggctccgggaggcgggggcggcggcggggcggcccctccggctggcccggccccggcctcgcccgcgtaggatgccaggaggttggcggcggcggcggctgctgggttggccccggcggccacggcggccaggacgccggaagctgcggccgagttgaggcccaggcccagggagttggtgttgtagccgtaacttgccagcgtgttaagcgccgtgctgatggccagcaggtcggtgcctgagaaggcgggcagcgcggcgggaaaggcccccacgccagccagcccggcggggcccagcaggccggaggcggcggcggccgacgctgcggccgcggctggcagcacatccgcggggctggcgtacggagagccggtggggttggagttggccacggggcctgccacgttggcgtagctgatgttgaggcagctgctgctctgggggtcttcttgtaccttctgcacgatggcgctcacggccttgtgcacctgctcgggctcgccgctgaccgtcaccacgcgctcctgcaggttgatgccctccggcttctgggacagctgcacccatgctcctgactgttccatcacggctttcaccgtggcgcctcccttgccgatgatcaggcccgccgtgctgttggggacgatcagcttggcctgcgtggggagcaaaagggagggtctttaattttatttttttaaaaaattaaattaaattaggctgggcacggtggctgtcgcctgtaatcccagcactttggggggctgaggcaggcagattacttgaggtcaggagttccagactagcctggccaacatggtgaaactccgtctctagtaaaaatccaaaaattagccagctgtgtgttggcacatgcctgtaatcccagctactcaggaggctgaggcaggagaatcgcttgaacccaggagagggaggatgcagtgagctgagctcgtgccaaattgcactccagcctgagtgacagagggagaccctgtctcaaaataaaataaaataatatatatatatatatatataattttgtctatctatattagtagagatggggccttgcgatgttgcccaggctggtcttgaactcttggcctcaagggatctcctgccttagcctcctaaagtgttggaattacagatttgagccaccaaactggcgaagggagggtctttacggtggctggagactgagacgccccaggtcattccctacccctcctctccagcatccaaaatcaggcccagcatggccttttgatatgcaccagtatggtccaactggttgttaaaaatattgaaatatttcaggtcaggtgcaatggctcaggcctgtaatcccagcactttgacaggctgaggtgggaggataacttgagcccaggagtttgagaccagcctgggcaacatagcgagatcttgcctctaacattaaaattttttttaaaaaaattgaaatatatccacaatggttggttaatgaatagccagtatttgaggtcccctcagtagcccctcaaccaccctgtcccatgtacctgggactcttagtacttcctctgcgtccagcatctaaaagcttaatggctaatccaatggggccctccaggatctcactccaagcttgcacaatggcccacccatgccttctagtgttacgtactctgacttccagccctggaaaagccttcattaagccttactttacagatgagcctcttgaggcccaagaggtgaaaggacttgtcctaaggttccccagttagtgacggagctgaaatctaggctcttgggttcctgatccattgtgctcccctagacatggtcttctcgttgaactctctgttgttatgggctgacactgtgtccccttcaaattcatatgttgaaggcgtaacttccagtactttagaatttgactatatttggagagagggtctttaaagagataattaaggtaaaatggggtcattagggcgggccctaatttactgactggtgtccttataagcagaggagattaggacacagatgcacacagagggaagactgtgtgaagacacagggagaagaaggtctaggagagaggcctcagaagaaaccaaccctgctgacaccttgatcttggacttctggcctccagaatcatgagatataaatacctgttgtttagaccacccagtctctggcactttgttatggcagccctagcagactaatctagttgtcctgtctgtaaaatgaagataacatgaaggcttttgtctgagaaggcagacgtaagtggatgtcttggatgtcacacaatggatcgggaacccaagaatctagatttcaatctccttctaattcctgggacgggaactctccaggatgaagaagttggtcatttgaatctggtgacctctcctttctcagttgcagagcagccatccttcaaccacccatttgtccaagcatctgcaagtctgatcaatcttaattcctgtggagacatttcaaaaccagtcatgtccttttgcacctccgagagcatttctacacataaattcctccctctcaaaaatccttcccatgtccccttaaaccctgggggtgtctgagaaatttgtgggggtggtggttttggttgttgcaaggactgggggaagatgtggactgtcagtggggaggaccataggtgtctgtaccccacaatggagagtcagtccctcacaagaaagagctgtcccaggccctatatgtctacttttttttttttttttttgagacggagtctcactgtgtcacccaggctggtacacagtggtgcgatctcggctcactgcaatctccacctcctgggttcaagggattctgccacctcagcctccctagtagctgggattacaggcgcccaccaccatgcccagctaatttttttgtatttttagtagagacagggtttcaccatgttggccaggccagtctcgaactcctggcctcaagtgatccagccacctcagcctcccaaagtgctgggattacaggtgtgagccaccgcacccagacactatatgactacttttgaatgtcctgttggacattcatgctgatgaagagcctgtttttaaatctctgagcccacgtctgggcacggtggctcacgcctgtaatcccagcacctcgggaggccaaggtgggaggatcacttgagcccaggagttgtagacctgcctgggtaacatggcatgaccccatctctacaaaaaaaaaattaaaaacattagctggcctggtggcacatgcctgtagtcccagctactcaggaggctaaggtgggaggatcacttgagcctgggaggtataggctacagtgagctgtaattgtgccactgcacttcaacctgggcaacacagtgaaaccctgactcaaaaaaaaaaaaaagtctctgagcccagaacccaactgacacagtgagaccctatcccccccaaaataaataagtaaataaaaataacaaaataaaaaaaatctctgagctcagagcccaaccccatgacacatgtaagtaccaagtattgtttgcatggttttaagagctactgaaatttccaggaacgcaactaccagtaaatcaagagcagattgtgctttgttttgctctgcacttcactaaaagttttcatcattttagaaaacctggcgtcagtagcaacagcatttgtattatttaagtctccagtattatactctggatcactttacatatgtagttgtctcacttagctatgcttaggtgtgagcagctgcctaattcattattccttctattgtggtcctgactatttatttacatattaaaattcaccttggctgggtgcagtgactcacacctgtaatcccggcactttgggaagctgaggcagggtgaatcacttgagcccaggagttcaagaccagcctgggcatcatgatgaaaacctgtctctagtaaaaatacaaaaaatagccaggtgtggtggcatctgcctgtggtcccagctacttgggaggctgaggtgggaggatcacttgagcccaggaggttgaggctgcagtgagctgtgattgtgccactgtactccagcctgggcaacagagcagaccctgtttcaaaaacaaaacaaaacaaaaaacaaaaacaacaacaaagaagcaaaaaataaaattcatcttgttttataacaaatcaccttccttttatttcttctttatttaaaaaagtctcgtgggataaataaaacatggtatatccatacaatggaatattacttggcaatacgttgaatgaacaaagtactgatacatgctatagcgtggatgaatctagaaaaaattatgctaagtgaaagaagccagttacaaaagaccacagctgagttcatttacataaatgtccagaatatgcagatccacagagccaaaaaggtagattagtggttgccagggaatgggaggaaggggattgggggtaactgcctacaggcataggatttcttttgggtaatagatactttctggaattagaaagtgttgatggttgaccatatactgtgtgattccttttacagaaatgtccagaataggcaaatctatagacacagaaagtagatttgtggtggcttggggttagggagagggtgagctgaggtgggagatcgaggggtcatagctaagatgatcaagatttcttttggaggccaggctcggtggcttatgcctgtaatccagcactttgggaggcagaggccagagactgcttgagcccaggaattagagatcaacctgggcaagatggtgaaacctcatctctacaaaaaataaaaataaattagctggatgcagtggtgtgcacctgtcgtctcagctactcaggagtctaagggatcacttgagcccaggagtttgaggctgcagtgagctataacaggtgccactacactccagcctgggtgacagtgcaagaccctgcctctaaaaaaagaaagaaagaaaaaaaaaaggatttattttgaaggcagtgcaaatgtttgaaaatggattgtggcaataggtgtacaactatgtgactataataaaagccaatgaactgtacactttatttatcatgtattttatgtttctctttttttaaatagggtcttgctctgatacccaggctggagtgcagtggtgtgatcagagctcactgcagccttgtacttctgggctcaagtgatcctccggcctcggcctcctaaagtgctgggattacaggcatgagcccccatactgggcctagagccgtgtaccttaaaagggtgagttgtatgtgaattatatctcaataaagctgtcaaaaagtcttacgggtgtagatatgtctatatgtgtatatatgaatatgaatagtatttcagagagtcaagtgaacatgacaaaatatttgtaggagaaagggggtgttgctgtgacagagctccccatgctctattccctgttggtctccctgactttattattattattattattttttttttttttgagacacagtcttgctctgtcacccaggctatggtgcagtggcatcatctcagctcaatgcaacctccacctcctgggttcaagtgattctcaagtgagccgagatcatgccactgccctccagcctgaatgacagagtgagactccatctaaaaaaaaaaaaaaaaaaaggccaggcatggtggctcatgcctgtaatcccagcactttgggacgctgaggtgggcagatcgcttgagctcacaagttgtacagcctggacaacatggcaaaacctcatttctacaaaaagtacaaaaattaactgagtgtggtggtgcatgcctgtagtcccagctacttgggagtctgagaagggaggatggcttgagcccaagaggtggaggttgaagtgagccaaaatggcatcactacactccagtctgggtgatcgagccagaccttgtgaacaagaaaaaggaatcttcatttattctagagtaaaagagactaatgaggtgtaacaatcaaatgcaaagcacgaatgttgactgaatctcagattgaaaaatcctctatagctataaaagatattttagggcaatttgaatatggactttccaatgagacaatagtatagaattagcatttttgtttgtttgtttttgtttttaggtgtgttgacagtaatacaataatgtaggagattgtccttggaagatacatgttaaagtacttaggagtaaagagtcatgaggtcagccaggcacggtggctcacgcctgtaatcccagcgctttgggaggccaaggcgggcggatcacgaggtcaggagatcgagaccatcctggctaacatggtgaaaccccatttctatgaaaaatacaaaaattagccaggcgtggtggcacacgcctgtagttccagctacttgggaggctgagacaggagaattgcttgaacctgggaggcggaggttgcagcgagccgagatcatcgcaccactgcattccagcctggtgagtgagcaagactccgtctaaaaaaaaaaaaaaaaaaatcacaacaaaaattgtgtgtgcgcacgcgcatgtacacacatgcatgcacatgtgttcatgcatgcacaaatgttaacaactggtgaatctaagtgcagtgtatggggactattccttaaacattttcaaaataaaaaggaaaaaaatctatgccctaacattcccttttcctcttctccgctttatttttcttcatagtatttttcactctctaacatcctctatattttacttatctccttgtttattttgtgtttctctgtaaaagaatttcaaatccacgaggttagagatttttgcctgtattattactgctgggttctcagcgcctagaaaagtgcctggaacacagtagatactcagcaaagggtgagcgaataaatagacggatgaagactgaaggatgacacgcccacaggcccaagcaggaaggcgaatgggtggaggcagcaggtgtatcttacctggtgggggtggggagtggtagagtactatgcaattgggcagccaaactaagcctgatggacattttccagatgagttggaaatgctgatttgtaaaatgtgaagcaccctagttttttttttttcttttttttgagacggagtttcgctcttttgcccaggctagagtgcagtggcgcaatctcagctcactgcaacctccgtcttccagtttcaagcgattctcctgcctcagcctcccgagtagctaggattacaggcacccaccaccacgcccggctaatttttgtatttttagtagcgatggggttttaacatgttagccaggctcgttttgaactcctgacctcgtgatccgcctgtctcagcctcccaaagtactgggattacaggcctgagccaccacacctggccagcatcctagtttttaaatgttggcaatctcttaaaaatgtctaagatttgtgtagtagaaacaatgcaatgtactagccaggctacccatttgcagtctgtgcatacaaatccctgaaaagctgccttggactctggagtcacctgcttgggtttaaatcctggctccctgtctgatgctgggcaagggacctaacctctttgagactcagttttctcatctgtaaaacaaggatattcagacctcctcataggactatgatgaagcttaattgagcttatgcatgtaatggtgagcttgaaatccaagcatgaccacaagtagctggaactgagagtgagtgcccttcaggtgactcacaactgctaccattggcagattacacctcagtccctatgtttctgcttggccctgtgggtgaagtcatcacctattcattcaaataagtgacatgtgctgagcacctactatgtgccaagcatagggcatcatgtatgtgtgcaattaatataagccatagaagcactcaagaaatgattattgtcagccgggcgtgggggctcatgcctgtaatcccagaactttgggaggccaaggtgggcggatcacggggtcaggagatcaagaccattctggctaacacggtgaaaccccgtctctactaaaaatacaaaaaaattagccaggtgtggtggcgggtgcctgtagtcccagctactcgggaggctgaggcaggagaatggcgtgaacccgggagggggagcttgcagtgagccgagattgcgccattgcactccagcctgggggacggagggagactctgtctcaaaaaaaaaaaaaaaaagaaaaaagaaaagaaaagaaaaagaaatgattattgtcattgttatccccatggatggagctggatttaaatcccacatctgcggtacagctattatggaaaccagtctggcagttcttcaaaaagttgaacatagatttatcatatgtcccaacaattccaccctaggtatctacccgagagctggaaatatatatctacaaaaagacttgtacatgaatgttcagaagcattactcatcatagctaaaaaggagaaacaacccaaatgtctatcaactgatgaacagacaagcaaaatgtggtctatgcatacaatgaaacattatttgtctataaaaaggagtaaagttttgacacatgctaaactatagataaacctcgaaagtattacatcaagtgaaaaaagctagacacaaaagaccatatattatatgattctgtttatataaaagatccagaataggcaagtccacagagaccaaaagtagattagtggctggaagacgttgagactgggatctgggggaatggtgagtgactgctcatgggcacaaggtttctttttggcatgatgaaaatgttctggaattagatggtaactgatgtacgactctgtgaacatacaacaaaactactaaactgtacacttctaaacagtaaagcttacagtatgtgaattatagctcaacagagctgttatttcaaaaaaaaaaaaaaaaaaacaccaggaaaaacaaacagcctgacaaatcaagaagatggaacagcatgttcacaaccacaaccaggagtggtatttagtctgtgatgcagtattttagagcagtgaaggaaggatagattggccaagaaaaggtttgaggacaaggggttaatcatgtgggaaaaataaagttaggttttaagaaaatttctacctcttccacctcctagctggtggcctgtgaaagtccctttacttctcagagcctctttttccacatctgtaaaatgggcatactattcccgatccatacgatttgtgcaaatattcagtgagacactggaagcctgctctctggagtcactcagtcagcagggttgctgtttctacaacacagcaaggtccaaatcgtaggttgtttttttttttttttttttgagacaaagtcttgctctgtcagccaggctggagtgcagtggtgcgatcttgcctcactgcaacctctgcctctcaggttcaagtgattctcctgcctcagccgctggggtagctgggattacaggcgcctgccaccatgtctggctgatttttgtatttttagtagagatggggtttcaccatgttggccaggctggtcttgaactcctggcctcaagtaatccgcccacctcggcttcccaaggtgctgagattacaggcatgagccactacgtccagcctcctagtttattctttagtaactgtgtgaccttaggcaaatgccttcacctctctgtgccttacctttctcatctccagtattagcataaccacacctaccctatattattattggaaacattctttttttttttttttttacagtcttgctctgtcacccaggttggagtgcagtggcgcgatctcggctcactgcagcctccgcctcccaggttcaagcgattcttctgcctcagcctcctgaatagctgagactacaggtgtgcaccaccatgcccggctaatttttttgtatttttagtagagatggggttttgccatgttggccacgctggtctcgaactcctgacctcaggtgatccacccacctcggcctttcaaagtgttggaattacaggcatgagccactgctcccggcctgttatgggaaacattcaatgactaaagtgatgcccagtgcctggcacatgggaagcgctaagccaatggcagctgccttcatgatagaccctgaattgtagaactacagcatcttagaaagatctgcagatgcagactcatagaatcttggaatcccaggacattagaacagtagaatcttagataatacatgcttagaatcttggaatcacagagccatagaactgttgaagttttagagccagaaggaccagagaccatctgccccagtgatttgcaagcccatggaaatttgcaaatactactactaccaccaccaacaataacaacaaaagcagcatcaacagctaacagtttaatagagtaacttatctaggttccaccacaaccctaagataggtgttattattaccccattttctagattgggaaatggaggcacaaagaaagaacttgcacaagttctttcacaggtaatgagcagtagagtcaggatctgatcccgggccagagtttatgctcagattcctaagccttaccagaaatattgattcagtggttctggacaggacccatgaatctgcattttaagctacccagatgactcagatatcagctaggggtgagagccactggtataacccagaagtggcaatctggtgatcctcaggccccagtcagcctacagccatacatgtttttttgaccttcatagtgttttaaaagcagagttggcctggcgcaatggctcacgcctgtaatcccagcactttggggagctgaggcgggtggattgcttgagtccaggagttagagaacagcccgcaacatggtgaaatcctgtctctacaaaaaatacaaaaattagccaggggccgggcgcagtgtctcatgcctgtaatcccagcactttgggaggccaaggaaggcagatcacctgaggtcaggaattcgagactggcctggccaacatggtgaaaccccatctctactaaaaatacaaaaaattagccaggcatggtaacaggtgcctgtaatcccagctacttgggaggccaaggcaggagaatcacttgaacccgggagttgtaggttgcagtgagctgagaccaggccattgtactccatcctgggcaacaagagcaaaactccgtttcaaaaaaaaaaaaaagaaaagaaaaaaaaattagccaggcgtggtcgtgttcacctgtagtcccagctattcagtgggctgaggtgggaggatcgcttgagcctgggatgtcgaggctccagtgagcctagatcataccactgcactccagcctgggtgacagagtgtgactctgcctcagactaatatatattaaataataataataataaagcattttaaagtcagttgatctaaaaaatttatggcttcttttgaaaaatttggaagatgtggtagcactatgttcatgttcccaaagtgcaataattcggtggatttgagtggcagcttctccctttaaagatggcataccctctccagagagcaacaaccctcaaggcttttgttacctttttcaatactttagttatttaatttataatccctggtttggcccagctgctgcactgtaataaaagagaaactgaggtctacagaaggaaaggggctctgagtaacactgcaagtccaaggcagaaaagaagtagacctgtttcctgactcaaaaatcccataataacaacagagaacatttttggggctaactttctatgcattatacacataagctatgtgcttttcaaacatcaacgaacactaaccatcacccttaaggaggcatcataatgaatctcattttacaggtgagaaaaatgaggattggagaaatcaaagtcacttgctcaaggtcacataggacgtaagtactgtacggagaaggattcaactaaacaacagagcccagagcctgagttttcagctatgatctccctcagtctttggaacactcgagtaataaggcagggaataaatcctggttctataacctttcgactccactgtctcagagctcctgtggattagggggagggggtagaaggctcaggcacagatggtgctgaccccattttccttgcaacattcacaaactcctgatgaaccctgagtcccttgtggccacgaccaaggcggagggaagaggcaatgccctcgcctccctgtaaactgtgaataacttgtgcgctgctggtgggaagggattcgggagaaacctggcggggagcgaggagcttcagcaccaaggacagcgtccgcgctacacgccccaagccctgcggtcttttttgggagcgctccaccctgcagctctcctccaggcttctccgcccaccatttccccatgagcttaggggaactcaggcctgtgctctgccccacctcagggcaacgacaggacccaagaattccagattttacggactccctctctcctgtctttgcctctaggtagacgttaacgagccctcgcaaggggccctcccgtcagcccaggggttctcgccccattgcacggagtacgcatgcataggggagtggggacgggagagaaaacgggagccagccccgcgtttccgttcccttacgcacttccgggtccggacagcgctgcctgcagctttgaggggagcccacctgccccgtgagcgccgtcgtcatggcaaccggacaggcccgggaagcgattggccactccctgccacgcccctatgccactgcttccccgtaactgaggcaacggaggggcgctgccttcccccttccattccttcctggagagggctgtgtaggagagggacccacctcttctctcgctaatgaaacaccacctctacccccatacgttaattatggagggaaggaggatgagaggccatttgtaaactcttctggatgtggctgaactgtcactgaggtcacttccggtgatagcaggaagtgggaggcaggtcgttcagagagacaatgggatgaggtggaagagagaagaggaactagagaatcctaggaagaaaggatcgaacaatagggaatcatgccacattctcccagaccttcactccctctctgaatcaagcccactctaaatgttctggagtcctttctattctattagagctgactccctaaaaataatactaaccactaccatgtggtctttgactgatgagatttttatcagctttgtcccattgaacctcacagtaagcagtgatgtgggaggaatgtttctttgtgaatgtcaacagctttacagcaacccagtctctgccccagctgacctgcttggctctgtcggggttcatcgtggtttggggttgaaggatgttgaccacctcaggcttggtcatcgcttgtgggatttctcggaccttctcggcaataaagctgtgcacagcattcaaggcctctgccgtgccctgtactaggcatacccgctctgtggttcctgttgagcaagggagagagagggcacactcatgagacaggaatgggaacattcctgagagacaggccccatttaatggaagaggcaagctgaggtccagagagtggacctgactgatcacacggtgagcctgggggagcgggcatgggctggcaggccatgatgggcagctgggagaatgagtgccatcctgttttataatctgcacttcatctccctcccctaaaacaacctctagggatggaagaatgatgcttaaatgttttgcgatgcccacagcagccctgggcaggggagacagggctcagctgcctcttctcagttcttgcggttccctggttgctttggcaaccattcactcactccgcccccctccccttctggaagcagagagctcaggcctgcaacggttgccacagtaactggaacccccttatcggtctggctggccgggtcctcagcccacccccagggggacgagggacgaggccctgttgtcatggcaacccctgaaagcctgcagcgttggcctctgggctttttggagaggatgggggaagagctgggggatgggggaggcagaggagaggcctgagtgcctgtctgaacccaccagatggagggctgaggggtgggggagggcaggggtgtggacaggggagagcagggtgggtcaaagactgctcatggaggagtgaggaccaaggaactggggagggagggtctttcctggagattctccagatactggctgtggctctgtcctgggcatccttctcatttctgcatgagagtgttagggagtgggggcacgggggagagagaaactggggggtattgggatatgtgtgtgaaagagattctgggtgacactgtgaccagtgtgtgtgtctgcgaggctggtgagtggtgtgtgtgtgtgtgtgtgtgtgtgtgtgtgtgtgtgtacttgagcaggactagctagatgatcctaatctgtgtttgtagaagataaagtgcagagactgccttatgaacagactatgtgacacagtgattccggtgaagatgttcgtgcgtgcccttgtgtgtgggacagactttggtgtcgctttgatgatgaaggttatgtagactctttgtgagacagagctgagtgtatgtgagagtttgagagaaagaaacaaaagaatctcacaaagtgggatagaggctacacaatgaatatataccactttgagactggatggcagtgtatgtgtctgcatttgtgtgtgtacgtgtgtttgtgaaagtgaaagagagacacacttctggatgtttctgagactatttggatgaccagtgtgaatatacacatatgtacaggagacaggaaagaccctatgaccagtgtgtgtgaacctgagaaggagagacagacaggtagactcaggtgtcagtttgtaggactttttggatgactggtgtgtttgtgtatgtgtgtgtctgaacatgtgaattacagcgagacaaagaaaacttgactggtcagtgtgagaatgtgcgtgcctgggtgagccgggatgtgtgtgatgcgtggagtgtgagtgtgtctctctctctttgaaggggattctgcccctgagaatgtaaaaggtcttgagtgtggccgggtgcggtggctcacgcttgaaaccccagcactttgggaggccgaggtgggcagatcatgaggtcaagagatcgagaccatcctgggcaacatggtgaaaccctgtttctactaaaaatacaagaattagctgggcgtggtggcacgcacctgtagtcccagctacacgggaggctgagacaggagaatcgcttgaacctgggaggcggaggttgcagtgagccgagatcatgctactgcactccagcctggcggcagagcgggactccgtctcaaaaaaaaaacaaaaaaaagaaaaaaaacaaaaagtgtcttgagtgtgcaccaggcaccgtgtggctgtgtacctgtgtgtctgggatacctggggtgtgtgtcagtgtccagcaagcacttcagtgcagcacgctggtgacacgaccctgactcctcaattgccatttcccagtctggcaggccagcctcgccatgtgtctgggcgtcactgtctgtgggtcacttgtgtagctgacatcccccacccgctttgggccatgttcctcactcttactacccccccttccccaccccagaacaatggcttggtctgagccaagggtgagtcagcctgcagtctgcctccgtctggtgtaaataggaaagggtgtgggttggggtgggaactggggggcggggtagggggaggtggatgccccaggaagagctggccgagggtttgcctctctgtgaagcttccttccaactcaggaagtctttgaccttccatccccttgtagtttttacaagggggcccacaggggcttttggggaggttggttaagccccacaagagtgtctaataatagctgacccttatacaacccaagcctcaggcaccattctaagcactttttttttttttccctgagacaagagtctcattctgtcgcccaggctggagtgcagcggtgcgatctcagatcacggcaacctctgcctcccagttcaagtgattctcatgcctaagcctcctgagtagctgggattacaggcgtgtgccaccacgcccgtctaagttttgcattttttgtagagatgggatttcaccatgctggccagtctggcctcaagtgatccacccgccttggtctcccaaagtgctgggattacagatgtgagccatcgcacctgaccaaagcactttatacatacgtgttcacttaatatatgaagtaggcaatattattattgtccctgattccctgctaaggacgccgaggcacagagagggctcaagatgtgttcaagttctcttagatggtagtggatgttcagagatttgaacccaggtgtctggcttcagagtctgtgcattctgctaaatttggggtgcatggagtgatcagctctatgtgtgtatcttggagggaggcataaaatgatgacagttttatttttgtatttttgatattaaaaagaatatgaatgtattaagtagtcattcaagagtatgcacgttgatagaggtatgttataaaactataaaaatgttttttgaagtgtgtgtggtgggacacagtggctcatgcctgcaatcccatcactttaggaggccaaggtggatggagggcttgagctcaggagttcagcctgggcaatatagcgagaccccatctctacaaaaaaaaatatacaggccaggtgcagtggctcacgcctgtaatcccagcactttgggaggccgaggcgggtggatcacctgaggtctggagtccgagaccagcctgctaacatggtgaaaccctgtctctactgaaaatacaaaaaattagctgggcatggtaatggacgcctgtgatcccagctactcgggaggctgagacaggagaatcgcttgaacctgggaggcggaggttgcagtgagccgagatctcaccactgcactccagcctgggcaacaacagcgaatctctgtctaaaaaaaaaaaaaaaagtagctgggcctggtggtgcacacctgtagttccagttactcaggaggctgaggtgggagaatcacctgagcccaggaggttgaggttgcagcgagccacgatcgtgccactgcactccagcctgggtaacagaggaagaccctgcctcaatataaataaataaatacaaaataaaaagtgtgtgtgtgtctgtgcttttcttcagcagttagggtataaagcttcaagcagatgttcaacatcagacggtgttttagaatccctagggtggccggtcgcggtggctcaagcctagcactttgggaggccgaggcgggtggatcgcgaggtcaggagatcaagaccatcctggccaatatggtgaaaccctgtctctactaaaatacaaaaacataaaaataaaaaaattagttgggcatagtggcacatgcctgtagtcccagctactcgggaggctgaggcaggggactcgcttggacccaggaggcaggggttgcagtgagccgagatcacgccactgcactccagcctggtgacagagcaagactccgtctcaaaaaaaaaaaaaaaaaaaaatagaatcctcagggtggatctgggctgacgcaagggagtctgtgtggcccttgcgcaggtgcttgcctttttctgcatttcagttgctccatgtatgacctggatggattgaatctagggctttgggatccaccacaaaggaggggaggttgtgtgttctgcccttctcttggagttaagtgccaggtaggtttttatttcatgtagtagacacccaagtgctgtgtgtgtgtgtgtgtgtgagagtgtgtgtgtgtgggagcatgtgtgtgagtggggtgtgtgtgagtgtgaatgagtgtgagagcacgtgtgacaatgtgtgtgtaagcgtgtgtgtgagtgggatgtgtgtgaatgagtgtgagtgtgtgtaagcatgtgtgacaatgtgtgacagtgtgtgtgactgtgtgtaagcgtgtgtgtgggtgtgagggtgtgagtgtgaatgagtgtgtgtgagcatgacagtgtgcgtgtcagcgtgtgtgagtgtgagcgtgtgagactgtgtgtgagtgtgcatgtgagagtgtgagtgtgtgtgcatgctaacctactaggcccagagtgccctttcagtttctccactgtcatttctcacatgttctgtctgctttggctacattgaccaaactgctcagcagcctccgagtatgccattttgtcttcctgggcacacttccctgcactttacctcgctcatccttccctactgctctggtcgtctcttccaggaagctcttcctgacctccctgggctgggtcctttgtgccacttgggctccaactaccaacctctggacttcctgtcccagccctgaccactctgggtcatcactggtgtgacgtctgcttccctgactgggatgtgagaaccaaggaagcaaggctgggacatttcagccactgctattgtccccatttctgtctggcaccgggctggcatagaggaagtgctcagagaatgtgtgttgaatgaatgagtgaatgaatgaatgacagggtgtcacgccaggagtggagggaagtgttttttgtctcctgcagtagcttttccattttcctacattcctgtgggatgtaggactaggatgtagggggctgtgtcctgcttctctgagtcagcagccggctcatgctgtatgatctggaagttgcacgccaggagtggggatgggggctgaccacatgtccaggggctgaggagagacgctggctcctgttgcttgtctgaatactgtttgacctggtaggaccaatgtctgtcccgccttctgggtttcccagctgcctggcctgtggggtgtgtcaatgggctgggaggggacgacatgtctcgtggcacagaatgtgatccaggagcaaggaaccaagtgtcctcggaggaacattccgaacagaggtcttatccatatcttgtgggctacaggggagtggggaaaactgggccagggtggaagagaaaaggaggaggtgtgcctggttcactcgatttttctctaaacctcttgccaaagctgcttagtgagatgggaggctgggggcggggtggatggtggagagagagagagagagaagaggagagaagatagagcagagagagaatgagagagaaagagggaggagagagggaaagataggagagaggagagacggggtggggagagagagagagacagagagggagagagagagagagagagagaaagagagagagagaaaatgagtgcgtactgaccctgggctccagctctggtgtttgacctaaaaaatccaaggggattaaggatgaactagaaccagcactggaccaaagatgcaattcaggaggccttccctggagtcctagatgtcgatgcttgtcgggcattggtcttgggagggagatagggagaggtgagagactttggagggaatagagagagtggaggggccttggaaaatgtatggttgggggagaaggatggagcagggggagaggcagaaaagggactgggtttggaggaagggaagaaaaaaccaggagggagctgagacttaggaaaaaagagacacaggaagggagaggcagaaagaaatgtgtgacgcccgcagaggaggacctcagtgagagggggctagtagatactggttgaatggatgattgaacagagttcagagagagagaggaggaaaggaaaaacgtgagactatgagaggtggagggaaggaaaggatggggagagagacaggaagacaaaaggagaaggaaagatgaggggagggacagggaaagcagaggacagatgaagaggacaagagatggggggtatccaaacagaaccagagagatggacagagaggcagacagaggggcaagagacagagggaggcagaggggagcaagagacgagaagtcagaaacagaatgagagggagacacataaagaatgacaccgagacagagaaaaccagtgagactgggcaagagggggtgacagaattccaaaggggggagcaagtgtgtggaacatggctggctggcccccaagcccggagggacgccctgacacctgcctccctccccaccctcgctcctccaactgaccagagggggcaggtgtgtgggaaaagacacatctgccagcgcatcatgcaaatgagctcatgaatatgcagcaggcccgttgtcttgccctgcccccacccccatctgctcggccaggcccctcgggctgggggcagctctgtccccttaggggaaggggaggccccctccccaccactgtcactgtccttagggcagaccttccccctcatctagggcccaggtgggagggagaaagggaggaagggcggggggcctagggcagagacctgggccggggctcaccggggtagaagtctttggacttggagagcttgatggtggctccggtctccttctgcagctgcacgatggtctgcccgcccttgccaatgatggagcccgccgcgtagctggggatcagcaccttcaggaagtattcgccttcctctgcgggggcacacagggtggaggggagtcagcgggggaggggtcttcacctttggagggggtgagcagaggaaaccccaggggtcacagtagcagtatggagaataatacaaataatgatcttcattcactcattcattcaacaaatagttattgagcacctgctacgtgcctggcactggtctagggaaacagccaagaagaaaatagacaaagctccccgatttgtgggcaaatgaggcaaataaggccgaaagagttttagtgattcagccaagagctcgcacagctagctacattcttctaggtggggaagacagacagtatatttcatgtcagatggtgggactcctgatgacacaaaaaaggcaggaaaagggggtcagggagggtgggaggctgcagtgtcagagagggaggccagggaagctcttcctaagaatgtggcaggctttattcatcatcacacacttttgcagcacctgataggtgctatactgttctaagtactttccaaataccagtcctttgaattttcacacttatcctatgaaggaacccatcatacagatgaggaaacaaaggtgaagaaatcacccaaggacacttgtaggtggcagagctgagatttggagtccatgctctgaactattatgatcatcaggatatggaggaaggaacggaaccacatggctatgtgaaggacgagtgagtgcaaaggccctgaagtgggactgtgcctgtgctcttccagagggactaaggaggcccctgtgcctggggctgaatgagagaggggaagaatgggaggagatgaggacagagaggggtgctggtggtgaggggtgatggggctcgcaggccacagtgaggtccttaacttttaccccaagtgagatggagccatgggagggatgtggcctgacttaggttttaggaggattcctctgatgcccatgaggggagcagaccgtgagaagcaacggtgggagaggtgggggcccagtgaggtggcgactgcaatggtccaggcaggaggtgacggcggtctgacaggtggaagcggtgagcggggaggcagaggaaggccggacgctggggatgctccgaacactcacttttgatcaggcgctgtgctgagtgctttgtgagcttgatctcgtccgttcctcacaacctcccggtgaggcgggtggaatgagctccatttttacacaagaggaaactgaggcacagaggggcacagagaagtgaaggtaccagcccacggtcatcaccagcccaaggacacgaacacagctactgggctcagattcaaatccaattctgattcagtctcctcccatcattgcttaacaccctccactcctggggggaccaacacgatgaaggacagcctcgaagacctagatgcagtgccagcggcagcttgtggagttttggccattctttgttataggccaatttttcttttccttttctttctttctttttctttttttgtttttcctgagatacggccttgctctattgcccaggctggagtgcagtggtgcagtctcggttcactgcaacctccacctcccgggtgtaaggggttcccctgcctcagacttccgagtagctgggactacaggcgcccgccaccacacgtggctaattttttgtatttttcgtagagacggggtttcgccatgttggtcaggctggtctcaaactcctgatttcaagtgatccgcccacctcggcctcccaaagtgctgggattacaggcgtgagccaccgcaccttgcttattataaaccagtttttttgaccatgtgaaaagcattttgttaatgtagtctcaaggcaagcatctagcctcccctgcccgttgcccctacgtgcctccaggatggaaattctggacacttctcagtataagaagaccctttgcggccgggagcggtagctcacgcctgtaatcccagcactgtggaaggcggaggcggaggcgggcagatcacgaggtcaagagacggataccatcctggccaacatagtgaaactccgtctctactaaaagtacaaaaattcgccgggtgtggtggcgcgtgcctgtagtcccagctactcgggaggctgaggcaggagaatcgcttgaacccaggaggcagaacttgcagtgagccgagatcgcgccactgcactccactccagcctggcgaccctttgtgacttggccccacccacctttccagcttcacttcctcatcttcctccgtgagcctcaggctcagtgcatattttgttccttaaacgtgccctgctccttcccaccttagggcttttgtgcatgctctgtgcctggcagcttctcttcccctcagtcagtttctttttttttttcttttgagacagagtctcgctctgtcgcccaggctggagtgcagtggcgcgatctcggctcactgcacgctccgcctctccgattcacgccattctcctgcctcagcctcccgagtagctgggactacaggtgcccaccaccacgcccagctaatttttgtatttttagtagagacggggtttcaccattttggccaggatggtctgggtcacctggcctcgtgatctgccctcctcggcctcccaaagtgctgggattacaagcgtgagccaccgcgcccgggccccctcagtcaatatcttttgtcctttaggttctcactcaaatgtttcttcttcttggaagctttccttgaaccccaaagataggatgaatccccgtttcatgccttcagagtaactgatcacagaggtccactgtggatcacatccatagagctcacccatgtcctagggacttgaacagtgtccccaaaacttgaacagcacatactaggtttgcaataagcactgggaaaagaaagggaggagttaggccatcctgcttccaaattttaaggtcttaaaccatcccccaatggtttttcaacttttaagcaaaggaagcctattttctttttttctttttctttttctttttttttttttttttttgagacaatctcgctcttgtcacccaggctgcagtgcaatggcgcgatctcggctcactgcaacctccgcctcccgggttcaagcgattcttctgcctcagcctgcggagtagctgggattacaggtgcccacaaccatgcccggctaatttgtgtgtgtgtgtgtgtgtgtgtgtgtgtgtgtgtgtgtgtgtgtgtgtgtatttttagtagagatggggtttcaccatgttagccaggctaacatgtgctgagattacaggggtgagccacagagcccagccaggaagcctattttcaatgtctcacgtaaaacctcaacatacagaacagataaaagagaaactgctctaacactctctgatctctctctctctctctctctctttctctttctctgttgcccaggctggaatacagtggtgccatcacagctcactgctgcctcgacctcctgggctcaagtgatcctcctgcctcggcctcccaagtagctgggactacaggcacatgccaccactcctaggtaattttaaaattttttgtagagatggagttttgccatgttgctcaggctggtctcgaactcctgagctcaagggatccaactgcctgggcctccaaaagtgttgggattacaggcgtgagtcaccatgcctggcctctgcctggcctcttaagatgaaagttctgtgttcccttatgtgtgtaagatgggggtgtggtaagaggggctagatgtggctttgcaggcatggggaagggtccagaattaaggagtttcctgacaccaaggcaatcctcttaaacttgcttaatcagaccattaagcctattaggtaattaacccctctctggtgccttcctaccaatcatcctgacccctactgaattcattctcttccatggactcacggatatgtcctcttccccaccctcaccctaaacttgtcacagataaggggtcctttatctccagaaggctcagaaagatggggagggaattctcactaatccctaggactccgtcctctctctgcttcttcaatttcactccccatcttctctcccagccagagcatcttccctgcttccctctgagggtggaaggtattcattttctctgaagaaaactggggtcaccctcttccccatcttctgccccctctctcttgtacttctttaaactgtccctgagaatttttgtatgaaacagcagaagcaactctagactaagagtgacgtttatggtcgagcgcagtggctcacgcctgtaatcctagtgttttgggaggccaaggcgggtggatcacttaaggtcatgagttcgagaccagcctggccaacatggtgaaactcccgtctccactaaaactacaaaaattagtcaggcctagtggcacattcctgtactcccagctactcgggaggctggggcaggagagtcgtttgaacccaggaggcagaggttgcagtgagctgagatcgcgtcactgcactccagcctgggtgacagagtgagactgtgtctcaaaaaaaaaaaaaagtgcattttgccactgatgggctctatgcccttgggcaagtctcctcacctctttgggcctcagctttcctcatctatacaatgggaatcatgatagtgctacttcatggggttactgtgattaatgaaatgaggaaatgtaaggaaaggtacttcggatggtcccaggcacatagaagatttgagaaatgttagatatcatcattatcagcattgcctacaccatgaacacaagttcagtgcttatcacagcatcagacacagagcaagcaccctatacgtggggtttgggggttgggttgagaggtaggaggaggggtgatcctactttgttaatcacccatttccctagggggctgtcccaaacttttccctccttcttggaggaggaatgtcctctcactgatacaagccagaccttgtctccattctctgcactcagcctctctctaattcctgtctttctcatgccaccttctagaattttgccccttttatgtccttctgtactggaattgttctttcttctctttttctctccttcttccttcccttcctccaacaaatccttcctgagcacccatgaccttccagtccttggttcaggtgctggggatgcagcagggaacagacaaggtccctttcctttaaattccttttaaattttaaatgcatttatttacttatttatttattgtatttttagtagagacggggtttcaccatgttgcccaggctggtcttgaactcctgggctcaagggatctgctcaccttagccttccaaagttctgggattacaggcatgagccaccgcgcctggcctaaatgcatccatttaaagaagaaattaggccgggtgtggtggctcacacctgtaattctagcactttgggaggccgaagcagatggatcacctgaggtcagaagttcgagaccagcctgaccaacatggtaaaaccccgtctctactaaatacaaaaaattagccagacgtggaggcacatgcctgtaatcccagctacttgggaggctgaagcagaagaattgcttgaacccgggaggcggaggttgcagtgagctgagatggtgccactgcactccagcctgggcaacaagagcgaaactccgtctcaaataaaaaaaaattaagaagaaatttaaaaatcgttgctaacaattggagcttgaagggctggttgtttttgttctccctaacatacattaatataaacatacaatgttcaaaaatgaaaaaaaagtttgtccatggaccaccttaaatcatcttgtgggtggcttgatggtccctgtatcagactagtgcaaatctgacgcctggagccccctcttctagtgagtctcctatgaacagtgattggctaagacctcccacctgtagagactcagcacttgaattcccaggagtccccgttgtgagcatcagtctgtgctggtccttcccagaattttatgcacatcttttctgtttggggaagtttcccaccatgtgagtcctacctccccagaaagaaaccaggtctctattgaccagccttcctcacagcaagggcagacacgtgacctcagctgaactcggagccctcagccattacgcacgcccaccctgtttgaacaaccaaggcactgcttgtgagaaagttctcccttgtagtgaggcagaatctacatgccagaactccgcacccacccattcccatcccactcttcactcttcccttgagtccaggcagctccctctacccgatgtaagagtctgaagaactgaagatagcaagttcaggtctcctgactaatttcctgctgcaatttcaaacatttccaccttggaaaggtgccgtctttccccttctagtcactgagtctctgctcttgctccttttgtatccaccccctcagggatgcttctgacggctttcaaaaatcccagcactttgggaggccgaggtgggcaggtcacctgaggttaggagtttgagaccagcctggccgacaaggtgaaaccctgtctctactaaaaatacaaaagttagccgggcatggttgtggcacgcctttaatctcagctacttgggaggctgaggcaggagaatcacttgaacctgggaggcggaggttgcaatgagccgagattgcgccactgcactccagccggggtcacacagcagggctccatctcaaaaaagaaaaaaaaaaaatcagccaatactcccttcccccttccataaataacaattgcctacccaagagatttggggtgttgtagtaagagtggcctattttagtgtcagagagttcaccctctaaggtggctttgatcttgggggtcatgaatgacaaaggtaaagctgaaggggtgtgggttgttgaggtgttgtttttggtgttagtgtgtccagatgcaacatcaatgttgggtgttgtcctcatggcacctcatggttttgtttgggggctggggaagggagagctggcatgttctatgagggtacgaggaggctggggtttgacatcggtgttgtcatcgggagcctgtggggatgctgctggcagagagggtgtggggtgggagcagtactgccgaggaggggtgggacttcaggcatgtgatgtgtttctgtgaatggcggtgttgcctatttggtgtgaaatgcaatacaactagagtgtgcttatgtagggatgagatgctgaaaggtgtgatgctgccttgagttgtgacggtctctaagtgaaagaaaggcagatgggccacggttttcttggagtgaatcaccattggatggtggatggtgaaaagggaaaatgacatacacttatataataataatgatgatgatgatgatgatagcgactgtttactgagcacttaccatctaccagccttacgctatgtgcttcacatatgcaatctcatctaatgcacaaaacccagagaggtagatcttcctgcctccatgtttcagacaagcaggctgaggctcagagtagtgaaataactcgcctgaggattccacaccaagcacatgacggtggcaagatatgaatcctgaaagagctcattctaggaggggctcttaacctggtgatgttgacttcgtgataaagaatgtggccgggcgtgctggctcacgcctgtaatcccagcactttaggaggcctaggtgggtagatcacctgaggtcaggggttcgagatcagcctggtcaacatgatgaaaccccatctctactaaaaatacagaagttagccaggcgtggtggcacatgcctgtaatcccagctacttgggaggctgaggtacgagaattgcttgaactcaggaggtggaggttgcagtgagctgagatggcaccactgcactccagcccgggcgatacagcgagactctgtctcagaaaaacagaacaaaacaaaacaaaataaacaacaacaacaaaaaacaaagaatgagggatgtggctgggaatggtggctcacacctgtaatcccagcaccttgagaggatgaagtgggtggatcacctgagatcaagaatttgagaccagcctgggcaacatagcaagaccctgtctctacaaaaaaattcaaagaattagtcaggcttggtggtgcacacctgtagttccagctactggggaaactgagatgggagcatcacctgatcctgagaggtcaaggttgcagtgagccatgactgcaccactacactccaagcctgggtgacagagtgagaccctgtctcagaaaaaaaaaaaaaaaaaaaaaaaaaaaagagggatgttaggagcaagatctggctggtgtaagctacgttgagggtgtgagatatgtatgtatgtctgtatatgggtttttattttgggggggttgacagaggtgggaatatagtcaggagtacaggggtcattattgttgcagcttaagagttacgatctgtatcaagggggccactgtttgttattgtcctgccagactggggtcatttatttctgcaaggagtccctgactagagtttccgtccaacctcttcacccaagtcttcctgcccttagtgccttgttttcctcccagcggcatctgccagccactcacagtgcccagaagcaagtgtgaactgccaccatctcctccacttctcccatctgctcccagaagcgggcaggagtggggcaagaatctcatctgtccagtaggccactgcttgctgggacacccaggaaaagccctctgagcctcagtttccccatctaaaaatagggtccattctagtgtctccccacacaatggagccagccgcctaagttcacatcatggttctgctgcttatcagctgagtgacgttgggcaagtgacttaacctctctgtgcctcagtttttcatctgtaacatgggttaacatgatagaattgttgtaaggattaaggaattgatccatgtcaagcacttcccatgatagttcctggcatactgcagtatcgtaagtctagccattattataactgattattattattccatcatagcatgttgggagagtgatatgaaattgcacgtaagacattaaacaataatataggtagctattgttagtattatccttgtgttttttgttggtttttttttttttgagatggcgtttcgctctgttgcccaggctggagtgtggtggtgcgatctcggctcactaaaacctccacctcctggattcaagcgattctcctgcctcaacctcctgagtagctcggactataggcgcccaccaccatgccccgataatttgtgtatttttagtagagatggggtctcaccatgttggccaagctgttcttgaactcctgacctcaaatgatccacccgcctcagcctatcaaagtgctgggattacaggcatgagctactgtgcccagccccttatggtcatttttatgtgcccacttggcagatgaggacactgaggctcagaaaaggggatgggttggcccagcatcccccagctatgaatgtatattattgaaagaagccctcaattttgggatcaaagtcctggacccttgcccagccctgcccctgagtgtgtttctgtcaatggaggcctgtccctctgcatctcccggcctcagtttccccatgagtaaacagaagcggggtgggagacagtctggaggagatggtccctaaaggctcatcctagtttccccgctgtggagggaggcaggatagcacagaggttacgtccaggagctccggaaccaggcagcctagggttgggtaaattctagctccatcacttagaaaccgtgtgaccttgggcaagcggtttcattttgctgagcctcagttttcctcatctgtaaagatgctcaaatcatgtctcccaggggttgtactgagatattaacccatgtctcagagtagtaggtgccaagtaggcagatgtgactgttattagcagcagtggcatcagtgttaagttgtgctgagaagtgatcagattctaagcatctcagtccctgtagagaaaggtgggaaccccctaccctctggaggacggtggtggagggctagacagtctggctgggctcagggacctcctgggtccctgacctctccaggactgggaacagcagtggggcaggaaggagggaaggaagtcggggacatattcatgtgtgtgctgggggtgggggagcaggaagaaggacaggaaactccctcccatcccctcccccaacttccctttcctccaatttctgctggacaccctcacaggcatccagggggtccctgattcctgtcccacctggatggaggtgggggagggctaggatgggaggaagaaagtcggcttgtattcatctgtagggaggaggtaggaggcccccaccccacccactgccaggcctggcggagaggaaagggtgcactctgcctgaagccatccctctcccatccggaggaaaaggccagaggaagtggagattttggcaaggtgaccgcggggaggggcttgtccgctgcggggtctccctcctaccagggagctagaggacagggctctgaggaccccaaaaaaccccacctcttccctgagccccccacggcagggcatgcacctagagttcccagctcggcttttcttctctggtacacacacctccttgggtcacacacccagggagagcccctctcttccctcacactgccttccgtggtgtcaaacattcggcaatctccaatacacacggacacacacacagcctcccttgtcaaacacatgcagaatcatccccatatctctggtgtcacacactcagccatttcacacacacacctctccttgttacacccatacacacagctgggtgtcatatgcacacgtgccctgtcacatggggacccatccttccttctcctttttacacaccctcgtgcgtttcacccacaagccccagcctctccctcgtcatacacccaccttccctgttgcacacaccccctctgatgtcactgttgcacacctccatgtgtcacacccagccacagcctctctggagtcacacccacacccttttcttgtcacatcccctcaccagccacgcctgtgtcacacacactggacccctttcctctgatctacacggcctcttctggctgacacccagagccagcccattcggtgtcccccacacacctccttgcatgtcacacacaccctctcatgtgtcacactctgccacagcccccttgggggtgacaagcacacacctttccttgtcacacgtacccgctggagggtctcaaacatggagcccagcccctgtcccctgtctttctcatacacccccctatgctgtcatattcctgatccctaatgtcacacatccaggctgtagagggcacacatacacacacacgcacacacatacacacctgtcctagcctcacattctcccacctagctttacacacccaccatttcctccatttcaccccacacacctacccagcctgtccccacgcacgatccggccagggccacacaagcctccatctgggacaacccttgttcaggacatccccagggagggaggctgggaagctcccggtccacaggcctctactccttcccctcccccagccaggacacgcgagctcggggaacacccctgctccgaaagggtcacatcacacacccctcaaggacacacagacacctgccctgaggctcccacgccccccatcttctgcgccccccaaggacacttatcaccccctcccccccacccctctcctcgcagacaaagctcccagccccgggcctcagcgagaggaggagggggtccagccccctcctcaactccccgctctgtcccccgcctcggggaggggtgtctctcccctccccagagcccttgcacctgccacgggagggggggaaaggatggagaaaggcgaggccccctgcccgctcccccgccccgagccgcagccctttctcacctcccgtgttgctgcgcttggtgcagaccacctcggggggcgtttcgaggggcctcttgcgggaatccggggcctcgggctccatggggggggcctggggcggcggctgctgctgctgcggcggctgcggcggcggcggcggcggctgctgtggcggcggcgacggctgctggggaggctggggttgcggcggcggcggcggcgggggcggcggcggctgcggggccgcggaggccgtgaagaggccgtgcaccgcgccggcggccatcatcctcatggtgggggggggcggggggcggggggcgggggagggggaggggaggggaggtgggagggggagggggcggtggagggatgggggagggggagccccggagagggaaggcgggggtaggggggagccggttctcggggggctgacagagcctggagagcggccgtgagcaggatggcagggccgaggggggtctccgatagggccgggaaagaactgagaggtggggtctctcctgggaccacagaggctggggactggacgcgccactggggggacgggactccccgcttcttcttggctccctggggcaagagggccgagccccccagaccctgctcggggtggggggccggaggagcgtggccggagtgggaggcggaggcggccgctagtgggggcccggggggcggcgggcgcgggcggcggcggcgacggggctggcggtggctgctggcccgagcatcttcttcccggaggctcccacagcgcctggcccctcccacccaacgaggtcacgcccatgccgggtagggccacgcccttcggcgcccccattggtccagccttgaagcctggaccacgtccctctgggttggccacgcccctcccggcggcagagagctggacccgactcccccaggctgctgggaggaccccgggctcctccaagccgtccccactcctcaccttgaatgaacgtttattgagcacttactgtgtgccaggtccggttccaagcaagcacgtcacagacgttatcgcatttactccccagagcgaccagctctgtgagttacgcttattatccctattttacagatgaggaaacagccttaggagcttactttgacttcacttggtcaagacaagaaatttcgactaggcgcggtggttcatgcctgtcatcccagcactttgggaggccgaggcggaagaatcacttgagcccaggagtttgagacgagctgggcaacaatattgtgagaccccatctctacaaaaaaaaaattttttttttaattagccaggcgtggtagcacatgcttgtagccccaggtactctggagtctgaggtgggaggatctcttgagcacaggagtttgaggctgcagtcagccatgatcaagcaactagattcgagcctgggagacagagcaaaaccttgtctcaaaaaaaaaaaaaaaaaagaaagaaagaaagagaaagaaatttcacttcactctttttcaatcctttcagctgggaaattccccttcaaatctttcatccatcctttgaagaatcaacaccgtgatgctgaaagggctcagaggattgaattcactgagctggagttgcagcctgcagcacctgccctggggcacaactggctctccattcaaacaacagcactcagggcctacctactaagtgccaggcactgtccctgatgctgcgatacaatagagaacaaaacagccttggcccttgtacagtattactactcatgtcattaagaaaaatttgttttcagatgacaaagtggaggcctgggaacattgagggtggcttcttcaagggcacacagcttgagagagagaaactgggatgagaacgcaggacaagtccaatttcagagcccaaagtcattggaactagggtgcctttctttggaatggatcattgctattattctgtgttccttgatgcaagaatttccttctccctgggttcttaacctccaaggaatctttccttcctgggttggtcagaggcaagattaggctcagaaggggtctggatgcaggtaattgtggccactgcgtgatctgcggcagggggatcggctccaacccccccctgctcctcccttgccatgctctcaggtccccaggatgggggagggtagcagatggcctggggtggatggggtggctacccatctgtcccctcccccccattgtccccagagccaagggggatgggagggggctgtggtccactgcagtctggatcctccccctccatcttcctggagggagctgaggagctggttgccatggagatggggaagaggcaagacggatatagggagatacgggggtcaggctgagtaccacaccttagaccctttgagtcaaatagcctcacaccacacaggtacatatcccaacatccatgaaattagctgtgaagtttccccctctgtgtgacacacacagagtcacactggccctgctgcaggtgcacggtctcaacacagtcacacagacacacttataggggataggcacacgtacacacacatacacactcatctgtaatgcacattcagtcatgcagacgcaaggccacaacacaggctctcatacacaaatagacagacacacatctaatatgcaggtatgtcccaggtacacacattcagagccacgacagctccacacttggccccacacactcggaaaagttacaaatccatgatcaaagccacaggacatccatggcctatgttacataagacatatcagcgacatgtgatgtatagactgacgaacagactaagtctttccttgcacacaaattgggtaaacacacacaacacacacatttagatacacggcccacataggctaacgcacacaataactggacttcacgggccactcagtgacacgcacaacacacatggaaagctgtgtgccgctcagcccccacccccgaggcatgcctgcagccccaaccctgcgctccccccatcgagccctcccgtttggacacacacaacagcacggtcggtcacgcactcacactcacacacaaacacaaacctcctgctagatatttttaaacccgggctagttctgctgccatggcaaccgccccaaacccatcaccatagcaacccaacgtcagctttccaagcaccaaatcctgggggactgcagggccccaatcagaggctggcggagggggctgctgcaccctttgccatcatccatgccacccttgtgcccccaccccagagctttcaggggagcagtcaccctagtctgggcaggggccagagtcagggacatcagagacccccaccaagctggggcaggggatccccgaacctgccttttccttccaacctggcagagctatatggaggggctcgttggagtgaaggtcagcttacagaagcctgggtttgagttctggccctgccatttacatgctgtgtgacttgggcatgcccttaccctttctgagtctctcattctttaatttggaaaatgttgctgctgctgttaataccccctttatttttattttattttttattttttaattttttggtatttttagtagagacaaggtttcaccacgttgaccaggtgggtcttgaactcttgacctcaggtgatctgcccgcctcgacctcccaaagtgttaggattacaggcgtgagccaccgtgtctggccaatatcccctttaaatgactgttatgatttggtggttaaaagcccagacagatctacatccagattctggctttcccacttcttagccatgtgaactcaggcaagggccttctcctctctatgacaagtctcaggggtaaatagtccaattacatagggctgctgggaagattccctagcaaaggggtatggcaactgtcctaagaactttgcatgtattctaacttatcagtcttaaacatggtcttatgggtggattactattcttatacccatcttgcggaaaaggaaactgagatccagagagcttgcctggtgtcacatagctacaaagtttagaaggatgggatttgggccgggtgcagtgcctcacgtctgtaatcccagcactttgggagggcgagatgggaagatcacttgagtccaggagttcaggaccagcctggacaacatggtgaaaccccatctctactaaaaaatacaaaaattagccacgggtggttgtgcacacctgtatttccagctacttgggaggttgatgcacaggaatcgcatgaacccaggaggcagaggttgcagtgagctgagatcgtgccactgcactccagcctaggtgacagagagagactctgtctcaaaaaaaaaaaaaaaaaaaagaagaagaaggagaagaatgaatgggatgggatttgagcctgggcagtcaaagacacatctttagccatttctctctcctgcctctcaaagagggcagtttggagaagggtgacagaatggtgcatccttggaaaggctttctagctttgttttctgggatgaaatgaaaggcctcagtctttcagcctacagaatggaggttgaaatgatactgctggctggagtgtcaggaggatcgataaggcagtttgtacctgttgggctctgaggacaggctggcacccctgagtgctcttgcaggtgtggagcagatcaggagaggctgggcgagtgggcaaatgggcaaggattacctgtgcaggctcaggagagaaactcactggggctcaagcctcagctttcccagcctggtgatcttaggcatgagatgtctccagcctaagcctcagtcttaccatctgtcaaatgggaatcatgaccatactcggggtgtgacaaggagtccatgagccaaagcaggcaaaaccacttggcacggatctcaacaaagagataaatctgagctgctattaatatcatccatctactcagcgcacaggatttaggagaggcaggactgcaaactttttttgcagggtttttgcaaactttgttgactcacagtgagaaacacacatcatgatgcaatgcatatattaggttggtgcaaaattcattgcgatttttatcatcaaaagcaatggcaaaaaccgcagttacatttgcaccaacctaatacaactgaaatgaaagtttcatgaaaccacgcttcatctccaccttagtctacattatgttgacactatgtgcgtagactctgatctattcttttttttctttttttttttgagacggagtcttgctcagttacccaggctggagtgcaatggtgcgatctcggctcactgcaacctccacctcctgggttcaagtgatcctcccacatcagcctcccgagtagctgggattacaaggagccgccatcatgcccggctaatttttgtagagatggggtttcaccatgttggtcaggccggtctggaactcctgacctgaggtgagccatctgccttagcttcccaaagtgctgggattacaggtgtgagccactatgcccggctgactctgatttattctatgctattgaaaaaactactggttgattttacagcctgctaagcagttgtgaccgacagtacagaacaccctggtgtggcgattacaatgtggaatccttgagtccctggaggattttaagcaaggaagtgacatgggcatcatagggacgatgaaggggagggggctagatgggggctgggatgaagccagaatggactctaagaaggagggatcctttgcctttaccccctggcagaagcagcggagatggagatcgtttgagcttgggaattcaaggctgcagtgagctgtgagatggagaggtgtggtcatataccaacaccagaaagcagctatctcagcgctttgcataaaaaggtatagtggggaggagcatgaaccccagacactcatctgcttggcaaatatttactgagcacctactatgtgttgggcactgttctaggtgctgggaatacagcagtgaacaaaacagatacaaattcctgacctcatgagctcacgttccagggagacagataatcaagtaaaaaagtaatacatagagtgtgacagatgaggctaactaccgtggggaaaatgcagcaggggaggaggaagaggcatagggtatgggggcaggggggatggctgcaattttatttatttatttatttatttatttatttatttatttactgatggagtctcactctgtcgcccaggctggagtgcggtggtgggatctcagctctctgcaacctctgcctcccaggttcaagcgattctcctgcctcagcctcccaagtagctgggattacaggcccgcgccatcatgcccggttaatttttgtattttcagtagagatagggtttcaccatgttggccaggctggtcatgaactcctgaccttaagtgatccacccacctcggcctcccaaagtgctgaaattataggcatgagccaccacacctggcctgcaattttaaatagggttgacatagagagagaaggcctcgctgaggaatgacatttgagcagagacctgaaggaggtgagggagtgggccgcatgggtctgtagggggagcagcaggtgcaaaggccctgaagcaagagcatgtctagtatgttggaggaagagcaaggagcctagggaagctggacgacagtaggggaggggaatagtgggaggaataaggctaaagagccagtcagggagccaactgtgcagggggccttgaggaccaccataaagacttcaatttgtatgcctgtaatcccaacactttgggaggccaaggcaggaggatcgtttgaggccaggagttcgagattagcctggacaacatagtgagactctgtctctacaagaaattaaaataaattaccagatgtggtggcatatacccgtagttccagctactctggaagctgaggatcgcttgagcccaggaggtcaaggctgcagtgagccaagatcacgccattgcgacagccttggtgacacagcgagaccctgactctaaatcaattttttgttaaaagacttagatttgactctgatttaagtgggagccatgggggtgggggggtggttgtgaacagaggaagaacttgagcagacttaaattttatcacatgatccttctgggttggatacagtggctcatgcctgtaatcccaacactttgggaggccagggtgggcgggttgcctgaagccaggaggttgaggctgcagtgagctgagatcgcaccactgcactccagtctgggtgacagagtgagaccctgtctcaaaaaaaaaaaaaaagttggggaggccaggcacgctgggtcatgcctgtaatcccagcagtttgggaggccgaagcaggcagatcatctgaggtcaggagtttgagaccagactggccaacatggcaaaacctcatctctactaaaaatgtaaatattagcaaggtgtggtggtgggcgcctgtaatcccagctactcgggaagctgaggcaggagaatcacttgaacccggaaggtggaggttgcagtgagccaagattgcgccactgcactccagtctgggcgacagagtaagactctgtctcaaaaaaaaaaaaaaaaaaaaaaaaaaaatactggggggaatccttctggctgtgtatgaagaacatggtagcagggatggggcagaagtaaggagcccaataggaggtgactttgaccaaccaggtgagaggtgctggtggttggaccaggatgtgagacagcagtgctggtgaggagatgtcttggaatcccagttctcccctgtgactttgggcaagtcatttcagagtctgtttcccgatttacagatgaggatgataataaagctcccacctcagagggctcctgcgtagtcttcatttcactgagcgtgaatagcccctggcacaagtgccgcctgccattgtcactaattttatcctcaaggctcctggatcagggcacttctgtaccctgcccagtggtgcacaggtgggctttggggaggaggataaggagaagagatttaatcttgtgtgctgattgtgtgtttatctgatcctggggatatctgagtcagggctttctcttcctaacagcctgtctgtagtagggagtattgaagtccagtgaggggtgctagcttgcccagaagcccacagtgagttgggggctgagccagggctagaaatctatccctgcctcctgttttctcaggcctgtgttccaggtcctggctgccaccttggtgattttggcaactgactgagtcccctcccccgctccagcctcaacatcttcctatgagtccctgctgcctctgggagaaattccaaactctcccggttgctcaggccaaaaccttgcagttgcccttgacatccctttcttcctcacacccacatccactccatcagcaaaccctttctgctctaccttgagttccaaatctcaccccatctccctacctccagcggcaccaccgaatgggggtccattagctcccacctggactctcccaggagcctcctccctcagaccccacttccacactggcccaccctttcccaccagcaaccagagtcatcctttttttttgagaccgagtctcgctctctcgccaaggccagagtgctgtggctcaatctcagctcactgcagcctccacctcctggattcaagctattctcctgcctcagcctcccgagaagctgggattacgggcacgtgccaccacacctggctaatttttgtatgtttagtagagacggggtttcaccatgttggccaggctggtctcaaactcctgacctcaaatgatctacccgccttggcctcccaaagtgctgggattacaggcgtgagccaccgtgcccggcccagagtcatccttttcaaaggtgagtcagatcacgcactgcgctttatctaaaagaaataaaaatggggtttctggccaggcacagtggctcatgcctgtaatcccagcactttgggaggccaaggcaggaggatcgtgtgaggtcaggagttcaagaccagcctgggcaacacagtgaaagcccatctctaaaaaaaaaaattcagccacacacagtatcttccacctgtagtcccagctacttggcaggctgagatgggaggatcatttgaacccaggaattcaaggctgcagtgagccttgatgacaccactcgcactgcagcctgggtgacagaacaagagcctgtctcaaaaaaaagtgtgcgtgtgggtgatttctgtaagaaccttgaggaacaatctgtattgctctatttcttggcttaggttgtggaagacgaaggcactttctgtgtgtctcttatgactacaaatagtacgaatgggtcggctgtggtggctcacacctgtaatcccagcactttgggaggccaaggcgggtggatcacaaggtcaggagttcgaggccagcctggccaacatggtgaaaccccgtttctactaaaaaatacaaaaattaactgggcatggtggcacgcgcctgtagtcccagctactcgggaggctgaggcaagagaatcacttgaacccaggaggtggatgttgcagtgagtcgagatcgtgccactgcactccagcctaggcgacagagcgagactccatcttaaaaaagaaaacaaaacaaaacaaacaaacaaacaaaaaaccccagtggaactgtgagagagctgggctttgaaccctggcagcctggctacaggggccattcttttaactgcttcaccagctgcctctctttctcacatgtccccctccctcagctgcaacgcctccccaccccatggtcctctccctccctggggatctcgatgcttccctgatttagaactgcaagtgcgtagacttatgctgattctatgcaatcatcttcagttacatttaattttagtaatttctccccttcatctgtccccccacaggcacccactcttatgtgcttaatttttggccttccaatctttctattcttttatcaagatccctgtgtatccttgcagttagttttgctgtatgtgggtgtgtgtggtgtttttttttttttttttttttgagatggagtctcgctctgtcgcccaggctggagtgcagtggcgcgatcttggctcactgcaagctccacctcctgggttcatgccatcctcccgcctcaggctccctagtagctgggacgacaggcgcccgccaccacgcccagctaattttttgtatttttagtagagatggggtttcaccatttacaggatggtctcgatcttctgacctcatgatccaccctcctcggccccccaaagtgctgggattacaggcgtgagccaccgtgcccggcgctgtatgtgtgttttaaatttgtagagtcgttgttaagctacaaacctcattctctttctttctttcttctttttgagagctctctgggtggctatgcttatttctagctggagatgagtgccagagtctgccccggttcaagttccatcctcactgcttattggatgaatgaccttgggcaagttacttaacctctctgggcttcagtttctccatttgtaagatgaaagttgttaaataatggtcactttctcataggattgttgcaagctggttttttgtttgttttttagagatggaatattgctctgtcacccaggttggaatgcagtggtgccatcatagctcactgcagcttcaaactctggtacttatttggtcttgaaacccactgggaaacagtagaacagtgagttttgcaaaggcaggaacaaggaattgagtagagggtaactccttatgctggaaggtcctgggctccagcgatcctcctggcttgacttgctaaagtgcaagctgatatcctttttttttttttttctgagatggagtcttgctctgtcgcccaggctggagtgcagtggcacgatctcggctgactgcaacctctgcttcctgggttcaagcaattatcctgcctcagccttccaaggagctgggattacaggcatgcgccaccacgccccgctaatttttgtatttttagtagagacggggtttcaccatgttggccaggctggtcttgaactcctgacctcgtgatccaaccacctcggtctcccaaagtgctgggattacaggcatcagtcaccgctcccagcccaagctgatatcttaaagcattcagcattgggcatttactgagcaatacactgatgttagtttctccctcttttacattgctgtgtagtattccactgtgtattccatattctacttctccaaccctaatgatggacatctacttctttccaactccttgctgcctaaattgcactccaatggacatcctcatacaaatctcatttaagggcctgttggacagtgtgataattgggtcatcaggcatcctcacatttaatttcttaaagtattgctggattgttcgccagaagggatgcacctctttggcctcctaccatccatggcaaatgatccattcttgcatatattcctccagaacttgatgttcttagactgtctaatttttgccaatctgttggatgtcagagaatgaatgtattgctttgatactttttttcctttttttttttttttttttgagacggagtctcactctattgccctggctggagtgcagtggtgggatctcggctcactgcaaactctgcctcccggtttcacgccattctcctgcctcagcctcccgagtagctgggactacaggcgcccgccaccgtgcccggctaattttttgtagttttagtagagacggggtttcaccgtgttagccaggatgatctcgatctcctgacctcatgatccgcccgccttggcctcccaaaatgctgggattacaggcgtgagccaccgcgcccagccctttcttttttttaagacggagtctcgctctgtcaccctggctggagtgcagtggtgtgctctcagctcactgcaatctctgcttcctgggttcatgtgattctcctacctcagcctcccaggtagctggggtagccacgcctagctaatgtttttgtatttttagtagagatggggcttcaccaggttggccaggctgatctcgatctcctgacctcaagtgatccatgcgcctcggcctcctgaagtgctgggattacaggcctgagccacagcgcccggccttgatactttcttatgtagatcagcttagcttcttcaggtttcctcggtcttcatctctacccagagttaccacaaactaatgtgtgtgtgtatataaggctttcaatatgaacccttcaatattatatatgtacattatatatatatccacatacacacacacacatatgtatatatacacacacatatatatatatataatagtttggagacagggtctcgctctgttgccgaggctggagtgcagtggtgcaatctcagctcacggcagcctcaacctccttggctcaagtaatcctctcaactcagcctcctgagtagctgggaccacaggcatgggccaccacacttgtctaatttttgtattttttgtagagtcggggtttcgtcatgttgcccaggctggtctcaaactcctgagctcatgcaatgcacctaccttggcctcccaaagtgttgggattacaggcctgagccaccatgcctgggccaaacactttaatattttaattgctgtcacagtagaaaaggaatcataatagcacatcccttctaaactgttatgacgattcagtgaatgataatagccacggtttattatgtgtttactacacggcgtgtgctgtgctaaactctgtatacatttactcacttatttcctctaaaagctctgggaggtccctgctgctgctatcgcccccattttatagaggagaaaactgacacatgaagaagttgactgcaagaagcagagctggaattgaaatccaggcagacaggctaactgaccatctcactgcctctcaatgagcctatgcaggaaaaacacacagggcttcacaaatattctgtatcatcccacctgtgatactcaggcagggcagtccagaagggcttggggaacgtttgctgattgcctctgcaaatttcttttttcgagacgagggcttgctctgttgcccaggctggagtgcagtgtggcacgcataatcatagctcactgcagcctcaacctccccggttcaaaacatcctcttgcagcagcctcctgagtagctgggactacaggcacacaccaccacacccagctaattttttttatttttagtagagatagggtctcactatgttgcccaggctggtcttgaactcctgggctcaagtgatctgactgcctcagcctctcaaagtgctggaattacaggcatgaaccactgcacctcctccacaaatttcataatgggttgagctattgggacattttccgagcataataataattgcatgttgcatttgggagaaaaacatcattttagagcgtataaaacctgaaagggacctcagtgggttgttaccgcatctgtaaaaggttcgggtaagactcatggtccctctcctttccagagcccctctgtttaccacatcaaagcatttataaccataatcatcacagccagattctttatttatttatttattttgagacagcgttttgctctgtcgcccaggctatagtacagtggtgcaatcttggctcgctgcaacctctgcctccagggttccagcgatgctcctgcttcagcctcccaagtagctgggactacaggtgtgcaccaccatgtccatctaatttttgtattttcagtagagacagggttttgcaatattggccaggctggactcaaactcctgacctcaagtggtcctcccaaagtgttgggattaaaggcatgagccaccatgcccggccaacaggcaggtttttatgagaatccccaagagcagcacttctgcagggtacacggctgtcacccagctctttcctactctgcacctgcatctgctgaacgtggccggagaaaaacacataatacagtggtgagactgagctcaccacaatttcacgattactcacctgggggctggggactgcctgccaacctcagtcctgtctattcactctcccaccctcctgggaatctatttcctacctgtggttccctcctccaaccttgcccacctcctctccatcctcaccctcacccttgaccctgttcttagttcctggagagaagagaagccatcaggaaacttcctcagattttcttgttttttttttggttttgttttgttttttgttttttgtttttaatggagtcttgctttatctcccaggctggagtgcagtggtgcaatctcggcttactgcaacctccgcctcccggcttcaagtgattctcctgccttggcctgctaagtagctgggactacaagtgcatgccaccacacccagctaattcttgtattttttttttttttttttttttttagtagagacggggttttaccatgttgatcaggatggtcttgatctcctgacctttgatccaccaacctcggcctcccaaagtgctgggattacaggcatgagcaccgcacccggcccttacgcaggttttcaacacatctacccacctacctgtgactattgttttcctctctcctgttaactgcagaaacactctcagccaaggccaacttctacatgtgtacacttggtccccttctctctcgcctactcagggacatcagtcaagcaagcctctgctttctctcctgcaccatcaattctccggtatctcctcgagcattctcattggcatcaaagcacattctaatacaaacctgctttttctttttctttctttctttctttctttctttctttctttctttctttcttactttctttctttctttctttctttctttctttctttctttctttctttctttctttctctctttctctctctctttctttctttctttttttctttgagatggaatcttgtactgttgcctgggctggaatgcagtggtgcgatctcagcttactgaaacctccacctcctgggttcatgcgattctcctgcctcagcctcccgagtagctaggattacagacacacaccaccatgcctggctaattttattattattattattattagtagtagtagtagtatttctatttgtatttttagtagagacggggtttcactatgttggccaggctggtctcgaactcctgactttgtgatctgcctgcctcagcctcccaaagtgctaggattacaggcgtgagccaccacgctgggcctctgctttttaaactccgtgtctgactctagcttcaatgttctgctgctctttataatacaatcctcagagactgggcatggtggctcatgcctgtaatttcagcactttgggaagccaagacgggtacatcacttgaggccaggagttcaagaccagcctggccaacatgggcaaaaccccatctctactaaaaatacaaagattagctgggcgtggtggccggcacctgtaatcccaactactcgggaggctgaggcaggaggattgcttgaacccgggtggtggaggttgcagtgaaccgagatcgtgccactgcactccagcctgggcaaccaagtgagactctgtctcaaaaaataacataataaaataaaataaaacaacacaatcctcagaggtatttgtactcatcttgtgtctctgattccttttcctcccaaatctgtgactttgccaaatcagctgttttttttttttttttttctcaggctggtcctgaactcctggggccaactgatcctcctgcctcagcctcgtgagtagccgagactacaggcatgtgctaccatgtctggctatttttaaaatgttttgtagagacagagtctccctatgtttcccaggctggtctcgaactcctaggctcaagtgatcctccctcctcagcctcccaaatagctggaatggcaggtgcaagccactgtgcccagctccaaatcagctcttggtgatgttaccaatgacccctatgtggctcagtcccgttgtccagtggcctgtcctcatattacttgagctccctccttgttgacagtcatgccttcctccttggtttattttctccctcaggttccaggacactccactctcaagacttcccttctggcccattggctcctctgcagtcttgcccgtccttggagtctttaaacattggagggctgtagggctcagttctggattctcttctcctttctctcttcactcactcttttggtgatggactcccacatcaatcagtctaggttggatcttatccctgaactcagactcatattcacctgtcctctcaatatttccactgggaagtctactgggtacctcaacacttccaaaaccaaatttctgattcacattctcctcctgtctccctatacctgcaattcacctaatctcaatacgtggaaacctcatcttggcatcttttcagatcaaaaaccttagagttggccgggcgcggtggctcacgcctataattccagcactttgggaggctgaggcgggtggaacacctatggtcaggagttcaagaccagcctggccaacatggtgaaaccctatttctactaaaaatgcaaaaaattagccaggcgtggtggcgggtacctgtaatcccagctactcgggaggcagaggcaggagaatcgcttgaacccgggaggcggaggttgcagtgagccgaggtcgcgccactgcactccaggacccttagaatcatttttgactcctctctttctcttcctcccgacactcaatccatcagcagattctgtcagctctaccttcagaatagattctaaccacttctcaccacctccgccatcaccaccctcgtggaagccaccatcacctctcattctaatgattttttaatctgttgcttaaattctttttttattgaggtgaaattcacattaacagaaaattaaccattttaaagtgagcaattcagtggcatttagtacgttcataatgttgtgcaatcatcacctccatctagttccaaaacatttcatcaccccccaaaggagacctcacacccattaaacagtgattacccattcgctccttcccccagcctctggcaccacaacactattttctgtctctgtggacttgcctcttctggacacttcatataaatggaatcatacactatgtgaccttttgtgtttgtcttctttcacttagcatcatgttttcaaggtttattatccatgttgtagcatctatcagcacttcatttcttttctctttttcttttgtttttgagatggagtcttgctctgttgcccaggctcgagtgcagtagcgcgatattggcttgccgcaacctccgcctcccgggttcaagcaattctcctgcctcagcctcctgagtagctgggattacaggcatgcgcctccatgcctggctaattttgtatttttagtagagactaatatggttttgccatgttggccacgctggtctcgaacgtctgacctcaggtgatccgcctgccccggcctcccaaagtgctgagattacaggcatgccactgcacctggccttatctgctcatagatttatggacatttgggttgtttccaccttttagctattgtgaataatgctgttatgaacatccatgtacaagtatttgaataccagtttttaattcccaggtatacacctaggagtgtaattgctgggtcatgtgttaattctgtttaactttctgagaaactggctgttttccatgtccacattattttaacagcctaagttttttaatttaaatttttatttttagagatcggttctcacaggctggagtgcagtgtcgaactcctgtcctcaaacaatccacctgcctcaacctcccgagtagctaacagcctattcttaatgcagccaccataatgatcattgaagacatgaatgagtaggccaggcggtggggctcacccctgtaatcctagtactttgggaggctgaggcgggtggattgcttgaactcaggcgttccagaccagcctgggtaacatggcgaaacctcgtctctactaacaatacaaaagttagccaggtgtggtggtgcatgcctgtaatcctgctactcgcggggttgaggcaggaggattgcttgaaacagggaggctgaggtttcagtaagccgagatggagccactgcactccagcctgggtgacaaagtgagaccctgattcaaaaaaaaaacaaaaaaagacatgagtaaaattatgtcctctctgcctaataccttcgatggctcccacctcactcagagtaaaacaaaaggcctcacaagggccgacaaggccttatataacctggtctcaggcatcctcccagacatcatcttctgtcacactccacacactcaatattgatgtctttgctgtttcttagaaacaccaggcatgttcccactacagggcctttgtactcactgtctcatcttcttgcaatggtccaccttggtaccctcaaggctggcttggccaggagcggtggctcacgcctgtaatcccatcactttgggagcccgaggcgggtggatcacatgagctcaggagttcgagagcagcctggccaacatggtgaaaccccatctctactgaaaatacaaaaattagccaggcatggtggcatgtgcctgtaatcccagctacttgggaggctgaggcaggagaattgcttgaacccaggaggtggaggttgcagtaagctgagatcacgccattgcacctccagtctgggccacagagcgagactccatctcaaaaataaataaataaataaataaaaataaaaataaaaaaaataaataggctgggtgtggtggctcacacctgtaattccagcactttgggaggctgagataggtggatcacttgaggtcaggagttcaagaccagcctggccaacacggtgaaaccccatctctactaaaaatacaaaaaaattagccaggcctggtggcaggcacctgtaatcccagctactcaggaggctgaggcaggagaattgcttgactttgggaggtggagggtgcagtgagtcaggcgccactgcactccagcctgggcgacagagtgaggctctctctccaaaataaataaatgaataaataaattcctggctcagtcacttgcttcaggtctctgctctaaatcagcttttctgagacatcttcccacccctctaacccccagttccatccacttcactctgctttattttctctgtagcacttatcaccccggacctggacatttctttctttcttttttttttttttcttttttttgagatggagtctcgctctgtggcccagtctggagtgtagtggcctgatctcagctcactgcaacctctgccttccgggttcaagcgattctcctgcctcagcctcccaagcagctgggattacgggcatgcaccgccatgcccaactaagttttgtagttttagtagagacagaattttgccatgttggccaggctggtcttgaactcctgacctcaggtgatccgcctgccttggcctcccaaagtgctgggattacaggcgtgagccaccgcgcctggcctatttctttactatatgttattatttgccttcctttcactagggtatgagcttttcctgtttgttaccagatgtttctacctccagcacccagaaaagtgcctggaacatagcaggtgctcaataaatggcctgacaagtgagtgaagaaataagtgaagcaatgaattgaactccacttacagatgaagaaagtgaagttcccagaagaggcatgacttgtgggaggtctcacagctggcaagggaaagccttcagattctaatccatgtttcctttttttttaattgttatttatttattaattattttcttagagacagagtcttgctctgtcactcaagctggagtgcaggcatttatgggatttagctgaggggaaggtgaagtgagaatacatttagattgggtttacagggatatttttatgtggttcatagatacttctcggatacttaaaccacctaattagttgtcatggcgtagaaatggcttcccggaatgcttctgttgtgtaagttactaactcactagatgcgaggccacagcctactaaatggcatgaatgtatcttttagcggctcattccagaagcatctgtgtaacagaaatgtcaggaattgaaaggaagcctgcgcggtggctcacacctgtaatcccagcattttgggaggctgaggtgggaggactgcttgaactcaggagttcgagaccagcctgggcaacatagtgaaaccccatgtgtactaaaaataaattaaaaaaaaattagccagatgtgatggcgtgtgcctgtagtaccagctacctgggagggtaaggcaggaggatcacttcagctcaggagttcaaggctgcagtgagccatgaacatgccactgcactccagcccagcgatgaagcgagaccctgtctcagcaaacaaagaaaccaacaaacaaaaaattgaaagtattgagccagaagttagtctgtggaaacattttccaaaacatagttaacatgtgaatgaaactttatgaaagtttttctttttttttttttggaggtggcatctcactctgttgcccaggctggcgtgcagtggcacgatcttggctcactgcaacctccgcctcccgagttcaagtgattctcctgcctcagcctcctgagtagctgggattacaggcgtccgctactgcgcccagctaattttttatatttttagtagagacagggtttcaccaggtggttcaggctggtctcgaactcctgacctcgtgattcccaaagtgctgggattacaggtgtgagccaccgcgcctggccagaagtttttctagatttccaaaagacttcaataacatcaccaatactgatttgtgaagctgaaacttgttctaaattataatgaatttttaaaaagttccatcaaccacgctagaggaaagataacttacttttctctttgtagacaaggatattgtgaaacatgcagctgaaaaagtaggaaacatcacagaggtgtgtcaggcagaaaattaataaaaacattacgttatcctttgggattttgcaatgtttgtggtatttggctcttttaaatatgtaatttgttattatttcatattctaagtaaactttcatgtcagtttttttttttctttaaactttattttcctttcttaaagaggtccctcctcccccatccccgcgctcaattcctttagctggatccttccagttcatgactgatcggtttaaaatatgggtcgttcaaaagccgtgtgaacccgggctagtggctatacctctctgagactgttttcttagtggtaaaatggaaatcataataactttgcagggctgttataaagtttaaataagccaagtcctgcaaaatgcttagtgcaggtttggaatgcaccaagcgatgacaaatctcaacctgtctttatgctgagaccactccccagtttccggagccgcggccactatctccccatgcgcatgcacacccggctctcccttccaggccctccccaccacgtgggcgcggcctaccctcccgcagggggtaataggtggagtcaaggggctacttccgggattctttcccttccactctggggaacaacctttttgtatgactggcagcattattagccagtagtgattagagaagagcccgacgttaggtgcctcccccaacccatttgggacagcctcttcttagttagccaattggaagttttggagggcgggttctcctctgggggagggacagagtgatgggcgtctcttttggctaatggaaacttggctgctggtaagctgtgaccaatcagaagcgagaacgccggatcctggggcggggctggagcttcgtcagttgaaccgctcgcgaggagggttgctagtggagaaggtgagaggccgcgggagtggcggttgcgcgggccgtggtggaggtcttaggtggaggggaaggggcttctctcgggggagagtgggctgcggtgggcagctgacctggccttgtaggaatcgggagggagggtgccctttaacaagggtaggcgcttgattgaggggttgtgaggctgagcgcagcatgtgagttgggggtgatctgtatatcgcaggagggtcttcaatggggaaagttgtaaagcaggagacagcagatggtaaaatatagagacgtccttggaatgcagcgtggcgatttagtaggaggttttaaggcagagggttattacagcgcactatgctttacaagctttgatttgggtgaaagtcgtgggaagaagcaatattgaggaagggagggaaggagacctccagggatgagcatgtactttaaagagatgtgaagccctattatgcctgtggcgtttgctatgtgctgtgcacctgccaagtgttttaggtgaattaactcttaaacttactctactgatggttaagaatgtgggctctggcgtcgggttgaatcccgaatttgaatcctggctctgccactgatcattactgtggctttgggccagttgtttaacccttctgtgcctcagcttcatcatcagtagaatgacatcatctctgtctataccattggctagcttcaccctctttatctaatgagaactcccacgtgtgtatttccagcctggatctctgccctgaactccagactcatatcatggccgactcttctctctttggaagttcatctgacattcagacataaacttgtcccaaaccaatcttgcgatttcttcctttcaacctccaaacccagttgatgggacattcatcctgccaggtactaagatcaagaagcttggagtgttcttttttttttttttttgagacagagtttcgctcttgtagcccaggctggagtgcaatggcgcgatcttggctcactgaaacctccacttcccagattcaagggaattacaggcgcccgccaccacacccagctaattgtttgtatttttagtagagaaggggtttcactatgttggccaggttggtcttgaactcgtgacctcaggtgatccacccgcctcagcctcccaaagtgttgggattacaggcgtgagccaccgtgcctggctagcttggagtcttcttcacttctcccttttgtcttacttatatatggtctagcagatcgcattagctctgtcttcaaaacacatccagaatccaaccatgcctcaccagctcctttgctaccactctggcctcagtttgtctcctgctcttacctggtttgttgcagtggccttccaggtgggctctctgcctctcactgttagggggatactagtagaacagaagtcaggtcaggttgtttctcctttcaaaccctctcctggctcccacattacactgcaaaagtcttcaccatatccacgaggccccaacctattgggttcctcctcctccctcccctcaactcccatcacttctctcattcccctggctcactctgctgcagccaccctggcctccccgctgtcatttgaacatagcgaacacattgccatctcagggcctttgtactcgctgtccctgaacgcactgccacctcagggcctttgtactcgctgtcctgtccttctggatcaggtcttttcaggtgtctgtgtggcttcttccacacctctttcaggtctccgctcagacgtcagcttcacaaccaggcatttgctaaagtactactcaagctaaaataactcctgtcactgtatggcccttcacttggctttatttttcttcataacaccactacctgatatagattattattattattttttttgagatggactcttgcgggtcacccaggctggagtgcagtggcgcgatctcggctcacggtagcctccacctcctgggttcaagtgattctcctgcctcagcctcccaactagctgggattacaggtgtatgccagcatgcccagctaatttttacatttttagtagagacggggttttgccatgttggccagggtggtctcaaactcctgacctcaggtgatccacccacctcagcctcccaaagtgctgagattacaggcgtgagccactgcgctgggcctattattattttttgagatagagtctctctctgtcacccaggctggagtgcagtggcctcatctcagctcactacaacctacgcctcccaagttcaagtgattctcctgtttcagcctcccaagtagctggaactacaggcatatgccaccacgcctggctaatttttgtaattttagcagagatggggtttcaccatcttggccaggctggtttcgaactcctgacctcaagtgatctgcccacctcagcctcccaaagtgctgagattacaggcgtgagtcactgtgcccggtcctcacatcaattactgttggtttatatccactgggcttcttggacctccccactagagtgtttgactccatgtgaatatggaacccagcacctagaagagcacatggtgtttaaaaagtgttgcttctcctatactgtcctcaccaccctttggggtctccctgtggtatggggcagggttgctgaactaggagggtcatgtgtggggtggtagggtcggaggtgggggaataaactgggcagattgtggcgcccaagggcagaaggaacctttagtgtctgaaggaacttggaggaaatgcagatttctgggcccacccccagagtttctgcttgtgtatagttgggacccgacctaggaagctgcattttcataagcacttgtggtaaggattatgttccttggccatcactgtgagaaacactgttaggctggttcagagtttgctggggccactgtggtgattgagacagctcctgacccagcctgggagtcagggagggcttcctgcaggagaggggattggagctgagacctggaggatgacagggaatgagccgaggggagaaaaccttggctgtatccccagtgtctagaaccccattccctggcatctcccgttaaattcacaagcagtccctgaagatacaagattgattaaaatggctctgccctcacgggctcctggtctgtcaaataatcaacagatcacacagatggtaacagggagtgccagccactgtttgaagcaccttatatacactaaataatttagttcaacaacaaccctataaggtaggagctcttattatcccgctttactgatgggggaaggcccagagagggcaagtactttgcccaaggacacaccaaggagaaaggcagctggaatctgaacccagaagtacccagcctgcagcatgtgccatgcttaaggtgtgaggccgcatttgggttagttctgggaggaaacaggaggtggtcagggaaggtcagctgggtaaggggaaggaagacgaatgtttctgtctttcatggtgggatcctagacaagcctcagtttcatcctctgtataatggggatggttataatacccaccagagagcagaatttagggtgagtcattcattgggttaataagtgtgcatggtccttatctaaggcaaaagtttgcctttgagagacagtgggagagggagttgatgccccagggggaactggggtgccgcagtgtgcaccgtagagatttcattgcttggttccccagagggcttctctgtctctacagtctatggggacaatgtggaaggctttggtctgtattctggggcagtgaagggggggttctatccagcctcaattcacccacgtggtggggaggtgaggtcagaatggggtcgggaagggggtcatccaggccaggccacgcgtgtgaatgtggggcggagggctgctgcaggagagagcccatctagggtatggctgggctggaatatgtgttggcggtggtggggagctgcagagtgtggggaaacagccatcaggtgtgggctgccaagggcagtgatttgcccgtgtctggtatgggaggtagtgatgtagatttgtctttggtgagcccagcgtggagagttttcagctccggccccggggtaagagctgtgaaatctgtgagctatctggggagagccatttggaaggtggagccaggggtggtgatgtaacgctggaaaggaaaggggtcatcctagtgaatgatgagagggagagagctgggggctgaaacactgggtgtaagtgtgccagcgccatgatgtcatgaggcccgagaagtgggtcaggtgtgtgggccaggatggggcctggagggcagccgcacagtgctcgcagggatggggtggtgacgtcatgggttggtgagggcggggcctcgaaggcaccgctgggatgcgtgaggtcaggaaggaggcagaggctgagaagaggaactgggagaggctcaggactggaatgaaatcagccaccaggatgagccactggtcattccgaagcaaggatggaggatgcaggtagagggacagggtcagcggcgggaggggagagggggctcagggtccggggaatcctagaagtggcggtggtggtggggtcagtggagaggaggggttgttcagagagggctctctaaagggaagagaggtggaaaatatgtgtgcgggtggagtgggggttgggggtggggttacaagcaatttgggagggaacagaatccaggtgaaatatgggagtgatggaatacaggctgaaagtgggatgtgtggagcagaaccttgagcaaatatgcgggaagaatgcagttggaataacggggtgcattgaagttgaatatgcgggagccctaggagaccgtgggtggctggtgtagggaggagagtgcggctgcctccctgcccccaaatctgggagagcaggatggaatgaaggggctttggacgggagagagggggctggtttccggggaatgtagcatgagggttgggctggaatatgtggagtgggaggttctgcagagaggaggggaaggggagtccagaattccgtggccatctgggggacaagtgacgggcagctggggtcagggaggccgtgtggagctggcacgggtgtgggatttattccatcagcagttactgagcacttaggacatgcctagaggaggggaaggggccgggcagcgggtgaagtttgtggaggtgagagaggtgtaagtgtgcaaggggaattgagtttaggcagagtattcggtggctcagtgtctgggatcagggcggggtgggggctaaggacaaggcaatgggatgccgaaaggggctgctcttcgcggggtgggtatggggggtttctgccgagcagtggggaaaggggagttggcggcggggatgcggtgtggcgggcccccttcctctgtgcggtctcctcccgggagttggggaccacgagtgggggcggtgatgctgtgcggctcctcaggtgttcagttccgtgggtgcctcctacgccttggtaacccggacggtgtcgccgctgataggttctgggagccggagggggtggggttgatgggcggggtttagaacacccagtggggcggggccagtgctgccacgcactgcattggggtcaggggatgtgggatatgcggcaatttgtttgcagcaagatcgagattattattttttatttatttgttttttctgagacagaatcttgctctgttacccaggctggagtgcaatggcatgatcttggctcacagcaacctctgcctcccgggttcaagcgattctcctgtctcagcctcccgagtagctgggattacaggcacctgccaccacgcccagctaatttttgtatttttagtagagacgaggtttcaccatgttggcgaggccggtctcgagctgacctcaaatgatccaccctcctcggcctcccaaagtgctgggattacaggcgtgagccaacgcacacggacgagatcgagattattaacctggacttatgaaccatcagagaatgaaagcacaattgccagaatgtgaattttccaggggaagggggtccccgaattcatcagcccttccaaagcactcttctcccaaatgaagttaagagctgtgatctagagagaggtgtctgtcaggaggtctagggcctacgccattgcccttgggcctctgagaaaagagatctgtggatgggcctggggggtggtaatttgggagccactgaaatgaacttgcaaaaggttttgggactattcatttatctgcagaaggctcagaaatttcattagattctcaaaggctcaaggactctaaaaaggttaaaaatcccttacctggagtttcaaggatcatcttttttgcctcacaatattgtattttctgatattagattttattttattttttgagatggagtctccccctgtcgccaggctggagtgcagtggcaccatctcagctcactgcaacctctgcctcctggcttcaagcgattctcctgcctcagcctccggagtagctgggattacaggcacggggcaccacacctggctaatttttttgtatttttagtagagatggggtttcaccattgttggccaggctggtctggaactcctgacctcatgatccacctgcctcgcctcccaaagtgctgggattacaggcatgagccaccgcacctggcctgctctgacccccttttaaaagcttggctcatcctactccaatacccccgtccctctttccagcttgacttttctccacaaatgtttgctgaatgaatgaatgaataataataaatatataatgagtataagacttaataaattaatactaatattaatcatgattctttttttggccatcatgtatttcttttctttcttttttttttttaactgagtcagggtctcactctgtcacccagactggagtgcagtggcaagatcacagctcactgcaagctctgcctccagcctcccgagtagctgggaccacaggcatgcaccaccacacctggcaatttttttgtatttttagtagaggtggggtttcaccacattgcccaggctggtcttgaactcttgagctcaagtgatcctcctgcctcagcctcccaaagtgctgggataacagttgtcagccaccgcgcccggcttggcaatcatgaatttctagtatccagcacatattggacacagcctccaggtcacagtaccaagtacttttatacatattgcccaatgtaatcctcacaacaagtccacgaggttggtgccattattatacccattttccagatgaggaaactaaggcacagagaggtgaattcgctttcccaggatgccacagctggtaaatgatggagccaggatatgaggcctggccttccaactcatgagcctgggctctgagctcctctaggtttctctctcatctccttctccagcaaccttggccatggaccagccggctggcctgcaggtggactacgtcttccggggtgtggagcatgccgtgcgggtgatggtttctgggcaggtgctggagctggaggtggaggaccggatgacggctgaccagtggcggggcgagttcgatgctggctgtgagtgtgcctgcctggggtgggctcacctttcctctcctgggatcagcttctcccagaatatcaggccaccctgaatcctgcccacctgcctcttctttgtcaccagaaactctccagtgtggggaggggtgtaggtcttgttgctcaagccagagacactggagtcgggtagaattgcagagcttaggtgcattgccctggggctgggcaagcggtcagacctcaggagagacttttctccccacccagtcattgaagatttgactcacaagacagggaacttcaaacagttcaacatcttctgtcatatgctggagtcagccctcactcaggtagggcccgggttggcgggttggggtgggaggggggttctgtcttccaggttccaggggggttgatgcccatctgatgtatgtaagaccctctaccttctctttcattgtgggaagagggcgatcattttcttcttttgccaagtgtaaatgcttcattttgaacttaatgatagttattctcatgtagaaaatttaggtcacagagaaatataaagaagaaagtaaaaatcactccagccctaatactcgcttctgttaatattttggtgaaaatcactccagtcctttctccatgtctctgtttgtttccaaatacgtgtgtgtgtgtgtgtgtgtgtgtgtgtgtgtgtgtgtgtgtatgcatttgcagatctgtaattatatatagtttatataatttccaaggtattctgcaacctgctttttttggtttgtttgtttattttttttttgagatggagtctcgctctgtcgcccaggctggagtgcagtggcaccatctcagctcactgcaacctccgcctcccaggttcaagcgattctcctgcctcagcctcctgagtagctgggattacaggcgcacgccaccatgcccggctaattttttgtatttttagtagagacggggtttcatcatgttgactaggctggtgtggagctccggacatcaggtgatccacccgcctctgcctcccagagtgctgggattacagacgtgaaccactgcgcccagcctgcaacttgcttttaaaggattcagcaatatctcataaaaatgtagtcacatcagtgaatatagccattcattcatttcatttgctgagcattgacagtgtgtcagtcattgtgggggacactggcgatacagcagtgaacaacagacaaaacccctgtcctcatgaggctgacattttggagagacagacaaatgaaaaaatacataatgtcaggtatttaaaagtttttgtttgtttgtttgagatggaatctcactctgtctcccaggctggagtgcagtggcgtgatctcaactcactgcaatctctgcctcctgggttcaagcaattctcctgcctcagcctcccgagtagctgggactacaggcgtgtgccgccacacccggctaatttttgtatttttagtagagatggggtttcactgtattggccaggctggtcttgaatacctgatctcaagtaatcctcctgccttggcttcccaaagtgttgcaattacaagcgtgagccaccgtgcccagcctaaaagtaataatcagggggaagaagcaggttagaacttagagtgacagggatgggtggtatttagatatcttttttttttttttttttttttttttgagacaagagttttgctcggttgcccaggcttagtggcacagtctcagctcactgcaacctccgcgtctcgggttcaagtgattctcatgcctcagcctcccaagtagctgggactacaggcctgcccaccatgcccagctaatttttgtatttatttatttattttttttgagatactatctgtgtagcccaggctggagtgcagtggcatgatattggctcactgcaacctccgcctcccgatttcaagcaattctcctatttcagcctcccgagtagctggaattacaggcatgcgccatcatgcccggctaattttgtatttttagtagagacggggttttgccatcttggccaggctggtcttgaattcctggcctcaagtgatccacctgcctcggcctcccaaagtgctgggattacaggtgtgagccaccgcgcctggcctggacaagcgatagtttcttaaaggttagttgcaatgtggaatctgcatcctcatcagtgaactttttgtattgttacattaaattccactgacttatcttgcattttgtatggatatttttttacctgtggatgatcttgtaacatcatgcattggtcatttggaaaatattggttcactaagttgtgcagattttccaaatgttgacacatttccttatataatatccagaagtcacatttgttaatatcctcaccgatttccccaggaaagtctgtgaacaccgagaagctatcagacacccagtggaagatacaagttttccaaaattctaatttcaagtgcaaagcttgaattttgttattggcaagacatcctgttagctgtttttcttgaagtgacaggctcactttgttcgtttttgagaaaatttctgccagatagcccgagtctaaataaccatagttttgtctgtcagtcgtttttttttttcaagtaaaaatagtgttctatgaaaagtggctaatttagctcaaaactcagatacagaagtgctttttcccgagaccatcgtcatactttggcgtgcacagaagtacttgatgtgtacttcccattttcttgctcaacataataaagagatgtgtgctctaggggctgaattcaataaaattaataatttttactgcttcatcaagaacattccgatgtttcatttcctgtgttttatggttgatttgcttatttacttgtttgtttatttctcttccccagccccccactgagactggggagatacaataacctccagtaccattcggtgccaggggcttgatttctcctaaggcaccagcagtttttcccaccattgcttttgtaccattcgcgcacatgtcaacacagtgaaaaagacaaatgacgtctttgtattattatgaaagtagctttgacctcagtggagatccctgaaagggtctcgtggaccccccagggatctggagacagcactcagagagtcacaggtctaagctgttctctctggttgagcatttaggttctttctggtttcttccttcgatgaagtccttgtgtctgccctaggacagggccatgttgattgccagccttcgcgtaggaaagcctagcccgcctagagaacgggaagggctgtggcccaggtgtgtgctaggtgccctccgtgtggcagtggcgggtgctgtggcagctcctcctctcctctcctgacagagtagtgagtcagtcaccctggacctgctgacctacacagacctggagtccctgcggaaccgcaagatggggggccgcccaggctccttggcccccaggtcggcccagctcaactccaagcgctacctgatcctcatctactccgtggagtttgacaggtggggagaagggtctggctccagggccaggctggtgggcggggtgggagaggatgtgggtaggccttaggaacccctggcacccaggcaaggtgatattggttaagccttgccttgggaatcttccctgttggggtttgtatcatttagtattgtgtttggctacaagtagcagaataaccatcaccagtgccctaaacaaacaatacatcaaacaaataatacgtcacgtaacaagatgtctaggtaggtgtctgccacctgtttaacagttccactagggactcaagctctttcttttttatttttttccttttactgtcgttaatgtgttggctttttttttttttgagatggagtctcactgtctcatccaggctggagtgcagtggtgtgatcttggctcaccgcaacctctccctcccaggttcaagcaattcttgtgcctcagcctccagagtagctgggactacaggcacccacaaccacgcctggctaatttttgtatttttagtagagacggggttttgtcatgttgcccaggctggtcttgaactcctggcctcaagtgatcctcctgcctcagcctctcaaaagtactgggattacaggcatgagccaccacgcccggcttggccttttgacttcatctttatctcttcatggccacaaaatagctgctggatcctccagacattgcatctatatcaaggcaggaagaagagggacagggctgagtttgttaattgcctttgctgtttttatcaggaaaaaaaaaagtgttcccagaagactcccaacagatttcctgtaatatgtggccagaggtggtcacatgcaagggatgctgggaaaatgaatatctggctttctagcctttatagggggagggtagcaagagagttgggaatggcagttgtgtagctaggtgaccgtgtctgtcccatgtgttagtagccactggatttcttagtggaaagttaccaatcctctgtgaatagcatctcatggggccgttaatcacaatggctcacctttccccagccaagccagggtcacccaggccaggccaaccagaatgccccgctgtggcatctgaattaggattgcgtttggctgcaagtaacatgataccagcattcccttcatcagcagtgggtgacaaggaagttcccccagactacaccagggctgccaatcccagtggtccccaaattgttatataagaggctttcacaggtggtgactggaacaaggggtccgggtacagggaggggccttgaggatgtgctcataagcctctaggacagtgcagtttttggaattgtgtgttttcgtactctgtggctctcagaggctgctgtttaccctcaggtgcattcttggcctctgagatgccacggttttaatcctccctcctcaggattcactacccgctgcccctcccgtaccagggcaagccagaccccgtggttctgcagggcatcatccggtcactgaaggaggaactgggccgcctgcaagggctggatggccagaacactcgggacacccgggagaatgagatctggcatctgcgggagcagtgagtcttggaggggtgggcagctggggcgggtgggggccctcccatcatgcaccgcggggcccatgctcggtcctgtggggaggatgactgtccttcgcccaccacgtattcttttttttttgagacaagagtctcactctgttgcccaggctggagtgcagtggtgcgatcttggctcactgcagcttccttctcccgggttcaagcgattctcctgtctcagcctcccaagtagctgggattacaggcacgcgccaccatgtccggctaatttttgtatttttagtagagaaggggttttgccatgttggccaggctgatctcaaactcctggcctcaagtgatctgcccgcgttggcctcccaaagtgctgggattacaggcatgagccactgcgcccggcctctgagcccctcttctgtacctttgtgctgggtggtgctggggacatagtggtgaccaagactatcttggcactgccctcctgggactctgagtccagggagggaggcagatgtgtttgcagacagtgaaggctctgggtggggtacctgaccctgcctggtacgggaggggtgttcttggcaaagggagcagcatgtgcaaaggttggggggaggtcgagctctatgtaggcgaatccaccttcatggggtgcaccttttgtgctagcccctccctgccactcacgtagtgcccagccctgggggagatgggtgctaagtatataaccacttgagtatatcattacagatggagatgagtagggcaggaaagggagcctgtgctgtgggaggctgtcacaggactccactggggtgtagggtgggtcaggcccaggggctggggaagtgttgtaggcagagggaacagcctgggcaaagtccttgtgttaggtgggaatgcggtgagaacaagggaatgaatgaagtgaaagaagcaaaggcctttggcatatatattcatgcctgccttgtgcttggttctgttggggagacgaatctggggcttgatcgctaccgggaagaggcctggctcgttggggaggactaataatatttttagtaataatgttaccagtaactaatgtttattgaacatttaactgtatgccagggctgctctgtgctttatgattaaattcattttatcctcacagccaccctacaaggtaggcactgctattatcaccgtttgacagaggcccagagaagttagggaacttggcgcaggtcacacagtgggtaatatggctaggctggaccttagatccaggcagccagcgccgagcctctgttgtttccccagctgtttgcactgttggtggctgcaagcccaggacagagcgctaagtgctgacccggaggaccagtccttatgggagctcatggggctggggaaccccgccggtctttggaggagctcgcctgtgtacggctgggccgaggaaggccgcagtggggaggccaaaatttatcctcaggatctgctctcaggctgtgtgtgtgtgtatgtgtgtgtgtgtgtgtgtgtgcgcgcgcgtttgctctgtctcaggctgtgtgtgtgtgtttctaggtttgtgtttctgggtgtgtgtttcccaagatggccacaagggggcgccctccaccctttggaaccaaccacaggagccttgagatcccaccgctgctcagtggcttcttatcttcctcttcccagccaggaattagggagtttgggaaggttctgagatttattcattcattgagccaacatttatggagttcatactgtgccaggcacactgcctgacgctagttaatgtttattatgctagacatggtctaagcactgtggatagattcttacagcctaacaggcgggcattcttattatcgtccctcttcacagatgagaaaagatggcctgaggctcagagatgtgaagtgaaactgcccagggccacccagcttgttaacaagtggaatagagttgaatgcagggcgcccggccacgcagcctggggtcctgtgcagtgaaccagacaggtggaggctctgcccccagaaaggtgggatccacatgggaaacggacactcctctacatgccaggtctgccagggctggtgctaggaaggaaaggtatagagggctgggagagcggagaacgtcaggggcaggtaggcttcccggatgagtggagtcgttcttgccaggagaagagggagagaaggttctgggaggtgagaactgcatctggctggagcctgtgggagagggaggcaggaggagaggaggggagaagtcagatgggcaggggctgaatagaaaggaaagctccttgttagagagtgtggggaaccacggattttaagaaggatttattaggaaaaattccagcaccacaaaagtaaacagtagtataatttgcacgtacttgtcccccagcttcaacagttacccacgtttgcccatcttgtttgatgtactgccaccccctgccctgtagcaaatcccagtcttcgtgtctcctctgtaaaagcatcagtgtgtatctttaacacataaggatataagtgctgccatcacatccaacaaaattcacaaaaattccaggatgtcatctgaaacccactgcgtatgcgttcacacttacacttctctgatcacctctcaaatgtcttttttgcaagtggtttgaattcgtcctgtatctaaatacggctgcacattgcagtttgtcgaggtctttcttttcttttctttctttctttttttttttttcagtcttgctctgttgcccaggctggagtgtggtggtacgatcttggctcgctgtgtccttacctcctgggctcaagcgattctcccacctcagcttcctgagtagctgggactacaggcacatgccatcatgcccagctaattttcatatttttttatagagacagggtttgcctgtgttgcccaggctgatcttgaacttctgaattcaagccatccacctgccttggccccccaaagtgctgagattacaggcacgagccactgagcttggctgatgtatttcttaaatctcttttaatttatatccccctctccacttttcatgctacttatttgtggaagaaatcaggttatttgtcctgtagagttttgcagtctagattttgctgaatttttccctagcaagcatactcagatggaaaaatgaaaaatagattttgctgattatatcgccatggtgtgtttaatgtccttctctgtcccctgtacttgcagtgaagtggtggctaaccctatataggtttaatcacatgtggggtaggttttggcaagatgcctcctttggtggtgttgagactgatgatttcagctgttgagagctggctccctcttttataaagttctcttcggcctttcaaccaatgcagtggttcactctggatatgcactcaaattgcccgggagctttgaaaaatctcagtgccctggctgccctgtacattcaccatttctttttctttttttgagaccgagtctcgcactgtcacccaggctggagtgcaatggcgtgatctctgctcactgcaacctctgcctcctgggttcaagcgattctcctgcctcagcctcctgagcagctgggattacaggtgtgtgccaccacacccggctgatttttgcatttttagtagagacggggtttcaccgtgttggccaggctgatctcgaactctcgacctgtctcaagtgatccacctgtctcagactcccagagtgttggaattacaggtgtaagccaccgtgcctggcctatttttctttttttaaaaattttgtgagcagtgaggagttccagggcaggccctgactcctccagacacaccacttacacctgaatctctgggatgggacccgtccctcctgcccaagagtcccactgcttccactacttaactttcttgttgtgaaaaataatatactccaaagagtataaaatataaatgtacggtttcacaaattatcataaagccagcgtacatgtaacaactacccaggttaaaaaattgaggctgggctcagtggctcacgcctataatcccagcactttgggaggccgaggcgggtggaacacctgaggtcaggagttcaagaccagcctggccaacatgatgaaaccctgtctctactaaaaatacaaaaatttagctgggcagggtggcgcatgcctgtagccccagctactcgggaggctgagacaggagaatcacttgaacccaggaggcagaggttgcagtgagccgagatcacgccactgcactccagcctgggtgacagagggagactctatgtggaaaaaaaaaaaaggagaaaaaaatcaaaagtagtcatttccccatagcctccgtatgtctttttccgggagagaccctcctgccccaaccatgctcccaaatgcaccagatctcactcacttgatttgcttatggttttgccagctgaactatgcatccctaaacaatatagtttagttgtatctctttttgcacttaatttaattttttttttttttttaagagacagagtcttgccctgtcacccaggctagagtgcagtagtgcagtcatggctcactgtcaactcagactcctgggttcagacaaccttcctgcctcagccttcccagtagctgggactacaggcacatggcaccatgccaagctattttttttttttgagacaaagtcttgttctgtcccccaagctggagtgcagtggtgcaatgtcagctcactgcaatctctgccttctgcctcctgggctcaagcgattctcctgcctcagcctcctgagtagctgggattacaggtgccccccaccagacctggctaattttttttttgaatttttagtagagagggggtttcaccatattggccaggctggtcttgaactcatgacctcaggtgatctgcctgccttggcctcccaaagtgctgggatgacaggcatgagccactgtacctggctgcaagctaatttttgtagagatggggatttaccttgttgcccaggcatgtctcaaactcttgggctcaaggtatctgtccgccttggcctcccaaagtgctgggattacaagtgtgagccaccacacttgacctacttatatgtcttttcttgtgatgaaaatcttagtttctagggataataacatatttatttgctttatcttaaacaataccagtgtaattactaataattgaattttgaatgaagtttaacatttccagggccgggtgcggtggctcacgcctgtaatcccagcacattgggaggctgaggcgggcagatcatgaggtcaggagtttgagaccatcttggccaacatggtgaaaccccgtctctactaaacatacaaaaattagccagggttggtggtgggcgcctgtaatcctagctacttgggggctgaggcaggagaatcgcttcaacccgggaggcagaggttgcagtgagccaagatcgtgccactgcactccagcctgggtgacagagcaagactccgtctcagaaaaaaaaaaaaaaagatttctttgcagttctttttggccttaggctatatcccgcttgctcaaacgatgtgttttagtcacctcctataattctccaatgtgccaccaactttgatatagagttaggtctgtttgggccagtttcttttaaaatttttgtgatggcatttgttaaaatttaattaattaatttgtataaaatatttttatagttccaaaactgaaaaagagggtacattcagagaggtccaatttcttacattttttaaaaaattatttttacttctggttttcttatttttttgagatgtgatccacctgcctcggcctcccaaagtgctgagattacaggcatgagccactttgtccagccagagaagtccaatttctgttcattttccccttccccataaataatccttttttcccccatagattttggtttattctgtaattttgaaaatataaacatataatttataattctcatttcttttatgaaaagggacattctgaacatactgtctgcaccgcactgtgtcacagcagtcactcggtgacaggacacagagatactctactttcctctttatagttttgtgggactcaattgagtagatgtattagaaattcaattagttctcttttaacatacattttggttatttccactcttttgctattacagattgtgctgcaatgaatagccttgtgtatacattttctcaaggaagggttttgagcatggtagttacctgatcaaatttgtattgtagaggatttcgtgactgggagactggcctggcgaggtgggaggaggagggaggcagtgctaggctttcagggtgtgtacagattgatgaaatcgtttagaattggaactcacatggctgtgttcccactccttcacccgcaccagggggaggagtgtgtgtgtgtgtcctgtgcgtggtggggtcatgtcctcttcgtgaggtgcatgggggtgatgtgaccacatccctcctcacacgtcgcaggggatatgataggaccctgcccctccccatggggtcagttgagactgatgagccgtgtacccccttccggggaggtgaaatgatgaggcgtcccacccccatggagtagtgggaatggggccatgcctctctctccagcgctctctccgcgtcttccccagggtgtcgcgcctggcgtccgagaagcgggagctggaggcgcagctgggccgatcgcgcgaggaggcgctggccgggcgcgcggcacgccaggaggccgaggcgctgcgcgggctggtgcgcgggctggagctggagctgcggcaggagcgcggcctcgggcacagggtggccggccgtcgcggccaggactgccgccgtctggccaaggaggtgagcagcgggggcccggggcggccagcgaggcgcggacctcggcctcagcctggacctccgcgcccctctcccctcccggcagctcgaggaggcgaaggcatcggagcggagcctgcgcgcccggctgaagacgctgaccagcgagctggcattgtacaagagggggtgagagcgaggcctgccaggcgcctgggcggatgggcgggccctgagggtgtggaggctgatgaggcggagcctaagggggcggggcggggccaggtagggtggagggggcggggctgaaggggaggcggggcttagcggaccccgtctggagtccagacaggatttgggtgcagtggttaggaggtggacccgggctgtgcggagatgcgcaggcttggggcggcgttcaggagggactgggaaagggatcgtgccctagggtctcctggtgcgaaagggtgcggcgcagcaggtgggatcagggtgaggtccgctggcatttatggggtgggtggtggaaaattggaaagagtttccggggagttgtggaagactccggaaagaagggtctgttgaaggcggtgtgttgaaaggatgtaggggaatgacagaggggtgttttaggggtccaattgggtgaggtctgggggggaagatatcgagagggtcatgggcccaggagtgcacgtctaggagttgatggggtaggcctgagggttcggagaaggtgcggtcggggaggagtctcgcgattgagtttgtcggggcgggcgggaagctgacagctgcctctgtggtctcaggaggcggactccgccggtgcagccgcccccgacgcgggaggaccgggcctcatcgtcccgggagcgctccgcgtcgcgaggccgcggcgccgcgcgctcctcatcccgggagagcggccgcgggagccggggtcggggccgccctgcgcgcccctcgccctcgcccacaggtctgtgcccctgccctgcggtagggaggggacgcactggcgctgccaaggcccgtctccggacctagccgcctcctctcccacgccgtcctaggtggtcgcgcgctccgcttcgaccccacggcctttgtgaaagccaaggaaaggaagcagagagagatccagatgaagtcagtgccccttcctccctcacctgcccctgtccctggcccgtgcccgctcccgggctctcatctctccacgccaccatcagtctccatcccctgccacctgctcgcttctcgccggataccccgcctgctctcccttccgtccgtcctacctcctcgtctgtgtttctgcgtgctttccgctcgtaggcctgtcacctcaggctttcgctggcgtggctgtgacctttaggggcgcagtgacccccttgcctgcaggagttgggcgtacagaccggcgtctcctttcttttttcccaggcagcagcagcggaaccgcttaggcagtgggggaagcggggacggtccgtccgtctcctggtctcgccagacccagccccctgctgccttgactggccgaggggacgcccctaaccgctcccgaaaccgcagctcctcaggtaactggcctggagctgggggctgccgggctaggcgggactgggcggggctgggcgggctgggaggcactgggcagggcgggcgggctgggagggcctgggaagcactgggcggggccagcgagggccagcggtcacgccctccgtctccctctagtggacagtttccgcagccgctgctcgtctgccagctcctgcagcgatttggaggatttctctgagtcgctctccagagggtaaaacttgaacttgggaaaaggatcgcctccaaagggtttctggggagactagaaacagtcttttgcagggaaattgggtgatggagcctgggggccttgaaaccacaaaggtcggggaggtgggaagtaccagagcctccccaccactggtccttggttactcctttttctcaggggtcaccgccgccgtgggaagcctcccagcccaacgccctggagtgggtccaatatggtgagtagaaggggcaacataaaccactggaacacagctgcccccatttcctgtgattccttcctggggatcaggtgcagaggcgactctgaatgcctttggcaatagggcttttttaagagtgcgtctcgctctttcaggctggggtgcagtggggcaattgtagctcacggcagctttcaactcctggactcaagagaccctcccacctcggcctatggagtagctgggactaggcttttttgggggggcagggtggggttgagacaggataagggggtggtattgtctctttatgttgcccaggctggtctggaactcctggcctcaagccatcctcagcctcctacagcgctggagttacaggctgggccagcgcacctggcctgggaacagcacgttttgagagcattagattggagaaggaataatgaggggcacgtgatgctctttagggctttggcttctgactgtcaggtcttgaaacctgtctcctcctcttcccagctgtatggttcaaggcagttctttagcctctctgtaccttagtttttgtttatcagttaaccagggttggtaatggcatcacctcacatgtgaggtgagggctctgtgaggacattaggaggttattttgcagataatgaatggccagtaggtgtcaggccttatttttccccaaggtccttaggctcaggatttccagtgggatttagggggacagaaatagagggacggtgggtgaccccctttcctaccttccccatcaccagaagtctccccccgtggaacgcagccaccatcagaaatctctggccaactccgggggctgggtccccatcaaaggtgagcctgggactccacatcccctctcccagccccaggacccgttggaatggtagtgcgggcagtggtatattgggcccaggaactccctggggcttcaggcccctcacagcccccatacccacacctgctctcacagagtacagctcggagcaccaggcggctgacatggccgaaatagacgcacgcctgaaggccttgcaggagtacatgaaccgactggacatgcggtcataacgtggagaaggggtactacccctccatcccccacccacttgctgggtatggtgtggggggtggggccagggtggcctccagccctgcccagtccctgccctggccccgtccctcctgctgcccctggggtctcaggtgtgtgaggccctgaccctgccctctccccaggcagtgcatgctgggagggaggatgtgtgcattttgtaaataaacatatttgccctggggacccctcagcttatgactaaagggtgagggtggagtggggagaaatgtggaggaagagaaattggggggtataattgggacctgtgtgtctgtgcctcggaggcagattgggactcaggcctaggaaaagcttgtacactctctaaacagtgcaagggcagacctgggaggagtagtgagcagcccgtccctaaaggagtccaagcaaagtttctgcgcaggatgcctttggctgtgtggtgggaaggaggtgtcttgcagcgtggttcactgcccaggaggacccccaggacccactgttggtgacatcccggccgccttggtgctgattcctgggctctgacctgagacctctgggttctgagctgtgatgttgctctcgagctgggatctccggggtcttggttcagggccggggcctctgggttccaagcaccagtgaggagagtgctgggaggggaaggggtgggagggctttggtcttgtgggagggagagaaggaggggaggtgtgtggtgggacctgctgaggaacacattttgagctacatctttattggagaaggagacagtggggtttttggccatgggaggggaggaatggggtgcggatcagcagggcctcagggggagcggtagtgtggccaattctggatgaggtggtagagctggttgcctggagagagtgtacgctgcacatcccggtgtcctttgagcacatagttggacctcagggctccctgagccacaccgcaggccagtagaccctgggctgcccggatggcctggggtgtgggcacccgatctggaggaggcagaggtaggagtcaggcaggggcttccccgaaggggaagtgatagcgtagggccccgtgtcagcccccatcccaactggctggacagtcactcacccatgtagttgcccatgaagctgatgccaatggacatggggttccataagtgacctgagtgggcacccgtgaagttccagccacggccctcgtatacgagcccgtcttctccaatcaggaagctgcatggggaggtgggggggcttgatgagtgagggagggtttcccgaggaggactcctcctccttcctccactcaccctgcctccgttactgccgtggtgcacacaacttccccagcatccttctcacccgttaatttcccacgatagtaacaatgactgtggtcatttattgggcccctgccatgtgccaagcacagctctgcatacacctttttccatcctcacagcaaccctgtgagtcactatcacccccgttttatatagacagaatcagagcggtagaatcacctgccccggggtcacacagcctgtctggggcacagctggggtttttaaccaggcctccatggtccccacccatgtgatcttgtgcgttgctctctcctgcctccctagaggatttgtggaagtcctgttttactgaatccttgcaggacagccctctgaggcagagacttttttttttttttttttttaagacggggtttcactcttgttgctcaggctggagtgcagtggcgtgatctcagctcaccgcaacctctgcctcctgggttcaagtgattctcgtgcctcagcctcctgagtacctgggattacaagcatgagccaccacacccggctaatttttgtattattagtagagatggggtttcaccatgttggccaggctggtctcgaactcccgacctcaggtgatctgcccgcctttggcctcccaaagtgctgggattacaagcatgagtcaccgtgcccagccaaggcagggactcttatcatcctcatcttaagcagagagagcagagactcagaaagcgacataatttgtacaagctactcagagccccctgcctctcagaactctgcctttgccccagcttgcttcctgccctcggggtccactgggggacaggatcacagactcaaagttggggtcgtaaccagataccgaccctggagccccagcacctgcctctttgaggttcccaagcctggcagcagatccttaaggctgattcattcagcacatctgattgagcgtgtctgacttggcaaatgggaatgaactagaagatcagtgccttggagctgcagtatgtgccaactcagcccccgcgctcacagtgtcattaatgacgcacagaatgtcggaacttccgaatcttgagtcccgaatctgctgcttaggaagccagctcccagaatctggccccagtgatgctggctgctgggactggctggttatggccctgctggtgatgctggctgctgggactggctggttatggccctgccatattcccggagcctggcatgatggtgctggggtcgggggtggttggttctccctggtcatttgttgcatgaatgcatctcattgaaacctcagccaccatcgccaagcgggtacagtcagaagccccatttacaggtgaagaaacgaggctcagagagagaaggtgacgtgacatggaaaggggattcagaacgttagaaccagattcggaatcctaaaagctgagggccagacagcggctgcttctgtatgtggtgatgtggacccgaggctcgggccttcgtgacctcatgggaacacttaggatcagagcgcctgagtcttggaaacaaaatgttgaagttggagtctttgataaaatcttgaactggaagggctgggaatacctttggacacttctagacttctctgggtgggttttgtgtgtgtgtgtgtgtgagacacagccttaggaggtcctgagaacatgtgtcccctgggtggggtctattgaagtggtctctggggacctgcatgttcctccaataagctctgcaggagattctgatgcttacctgggtctgagagcctgcaggattgaaagttccctccctgtggaaaccgtcaggctggactgcagcccattctaaggaggaggtagctggtaggcgtggccccggacctgcttcagcctgcttcagccggcaccccttacagtctgttctccccacagcagccagagggagtctcttgtacctacactagccctggtccctgctctgcggggggaagcctcccatggctcccatctcggagtaaaagctacagtcctcactgtggtccacaaagccctgcctggtcctgccctttcctcatttcattccgctcgcccggctgtgttcagccaccctgtccttcccacaggacccgcccactcaaccccgttggctttgcccccagcaccccctgccacctgcaggcctctgtctgctcccccatcccagagccaaggcagccactctcagggaggctttcccttgccccacccttccaaggagcctgtgtgggtctggtcccagcctgaggtcaccctccctcacctctttccttttatccatcgcctctatcaccgtctgaattcacctgtggccttggcttgtttctccctgctggtctttcaaccccaggaggctagagtggcaccgttctccatgccacatctggcacactgcctggcacatagtaggtgcctaatggtaatagcccgtggctttgcgggcccccgtgtgccaggcagttcctaggtgctttgcctgtattggctcatataaggagcagatgggccgcgattccattgactttgccgaggaggaagctgaagccgggaggacccgccccaggcctcagccagcaataagatgagctgaccctggaacccagctccgcactgagtcagcctggttttccgcctcctaacaaaggcaccaggcatcaggaaggggcgccttcataaggcgtcgcggacaccttggtgtgtgttaggcaaagcctgccccttcttcccgggagcgggagcggggcttggatttcagcccatccccccttctcacgcatctttgtgctgtgagcacctgccccggcccacgtggtgacccgaggaagaaatgaccttgtgaggttcagtaagctgctcagggtgtcagccaggtggcctcagcaccaggcctagaaatggtcccgctggcgggcacttgcacacctttgcctctgggatccccagtccagcccgtgcccccctgccacactcacttgtagcccacgtcgcaccagcccagtgtcttcatgtggtagtgctgcacattccgggcctgctgctggcacgaggcgggggtgttgcagctgctgcccgccgtgtgcgataccaccacatagcgtaagggcaggctcaggtgctgggcgcactctgatgccagggccttccactcgttccggggcactatggggctgcagcaggccgggtcttctgtctcctgagccgctccgagtcgaaggaggctggggagagcccaggcaagcagcatagagcggcgggacatagtggcagggcggcagggtccgggagaccgctaggagcgcccggtggaggggccgcctttatctgctgggggattccaggagtggcccggaaagtcttgcttcacaccctgctgggacttcctgctggcccagcagaccccagactcagcttccttctctggctgggccagggcgggatgcactgtggttggggtctgggtcacgcccacggcaatgacaggccccctcgctcagcagggagggacgcacaggcccctgggcgcttcgccccgccgtttctggaagacccggggccgggatcccggtcctgcttgtctctcctctcagtggaacattgaacaactcaacaggaacttacatcgcagaggcccggggcattggcacatcttctccccgcaaggactgaggtaacaaagctacccattttaaaaacacttccttcccccaggtccaagcctgatgccatttacgcttgcagcaaactcaagaggtgagtatctggaagtccatttcacagtggagtaaactgaggttgagagcagggaagtcacgggctgagacaccggaggcactggagccccgcgtctagagccaggctgcctgcatgtgaatcctggatatgcagtgtgtgagagcctgcaagtggtttttaaaaatgtgtatttaaaattttttttttaattttctattttataaataatattttcctttttttttttttttttttttgagatggagttttgctcttgtcacccaggctggagtgcaatggtgcgatcttgggccactgcaacctccgcctcctggcttcaagtgattctcctgcctcagcctcctgagtagctgggattacaagtgcacaccaccacgcccagctaatttttatatttttggtagagacggggttttgccatgttggcctggctggtgtcgaactcctgacctcaggtgagccacctgccagtgttccagagtgctgggattactataggcatgagccaccgtgcctgacctgtgtggtgtgttttcatcttctgtgttctgccttctcatatacattgtactcatgctgttactgaattgtgcaccaggcatctgtagcacttttcagaaattatcatatactcaacgacaagcttgccagatccatgttattattaacccctcttacagttgacggaactgaggcccggggggatgatcacatacaggaggtgatgaagccagggtttggctacaggctttctgcctgcagagttataaaccgtattctcctccctacaaacttatataaggacattaaaaaaaaaaatcaaaaccatgtgcatcaatttaccttttgtcacctaatatttcatgggcatctcaccagggcagtacatctaattctaatttattctttataatagttgcacaatatgctatagtatcagttcagcattgtggatcttttagtttttgaaggttttccagtattttctccacactacgcaaaatattttcagacatatatccctatgcactggtgcatttataagtaaattataaacacagagttattaggtcaatgagtatacatatttaattaatattaccagatcattttccccaaaaagccattaataattcatatttttcaccagtaatgttttggagcctcctcaccccgaccccagaagtgggtgttatcacttttttttttttttttttgagtcagagtctcgctctgtcactcaggctggaatgcagtggcacgatcttgtctcactgtaaacctccacctcctgggttcaagccattctcctgcctcagcctcccaggtagctgggattacaggcatgtgccaccacacctggctaatttttgtatttgtagtagagatggggtttcgccatgttggccaagctgatctcgaactcctgagctcaggtgatccacccacctcagcctcccaaagtgctgggattacaggcatgagccaccttgcctggccagtgttatcacttcttaaatttataagtataaagtgacagctcctttggcatttttatacccactcaggagactgggtatttttctgtatttgctgtctatatttgggcttgctcttttgtcaattacctgttcatatccattgcccattaaaaaaaattgggttgtttgcctttttgttattatttgcaaaatgaacaaaagaatcccataattgggatttttgacttcttgggtgtgtacattttgtgtatttcagtttttttagaagcattaaagaataatgtaatataaaaagtgtgtaaacacattttttatagagttgatagacttaatagagtagtgagcttatgagtgttcacgaagtgaatccacctgtgtatccagtgcctggattaagaagtagagctacacttaaaattttaataggaattggtaaatacaataccaaaaagattttagtatatatttttcccacaatatgatcagtttttaaatgttttactaatccaaagaacaagatctcattattgctttatttgcatttccttgaacattagagaggtgattatctttttacatatttatggctatcagcatccatcttcaaactgtctgttcatctcttctgatcattttcttgttgagttgtatatgggggatattaaccctatgtcttatcaaatgtgctgtaaaccctttcctctaatctgttaaaaaaatatctaggtttttcttttatggtttctgtgtttcctgtcttgccttaagagggacttttcacactaagattgtaaaactttttctatttaaaaaagattattttgtgttttacttttagatctttatctcggctaaaatgtatacttgcatgtggtgtgaggtaggggtctgatcttgtttccagatgcctagccgtttgcccaggttctgtttattatataggtagacctggttttaaatttccattctgccccttattagctacatgatcttgggaaattggatagcaattgacacagtcgaccacttcctccttctcaaaatacttatttcccttagcttttgtgatgtaagactgccttgattttccttctgcttctctggctggtctttttttctctctctctttttttcagagcaattcttccctcctggaccctcaaaccatatattttgtgctgagtgatcttatccacataatggcttcagccacagtcaaaatgcagaggattcctgtatttcaatgtctagtctggagctctcagttgagttctggatctgtgtatccacctggccacttgacgcctccacttggatgtcccacaggcacctccaatgcaaaatgactcatgaccttctcctccccatcagcactctcacaggagttcctgtctaaggaaatggtatcaccatcttcccattacaaaagccatacatttgagcaccatccttgactaattcctgttccttcctctgttgtacccagtacccaaaagaatgcccagcacatggtaggtgctcactaaatagctacttgattgaatggatatgcaacccaccaccaaggaatgccactgtgatgaattagaactcttctatctaattccattctctgcaccctggtccagacaccacctcctttcacctggattttgccctgcctcttcagtgacctcccaggatgcactctggcctctgtgaagccaaagctctgctcagatcttttctaaagtcaccctcaaaaatgagtcacatttttcattggcatctcttgattcctagaatgaggcccaagctcctccccatggccaacagcatgggctgcctacagtatgggctgcccccatcccagcctcaccttgcttactcccaaaagcctctttctgactcctgcagccactgtccccttcttgctgcccttgaacatgctttgactaccctgttcccttggggacttcagacacaccaggtataagttttaaatagaggaacctggaacgaattcaggaactttgtaccttagctttaagacaacaaaacaccaagccagccttttgtaaaaagacaggactatttacacatcacattcctttttttaatttttattttcttttttccctttcttttgcctgttctttcatttgaggcacagatcccttaaagacactaagaatataaacattagccagctggagtgaagccttccattgtgagagttttatttagtctgtatctttaaaaaaatgtatttacttatttattttttgagacagtttcactctgttgcccaggctggagtgcagtggcacaatcttggctcaccacaacctccgcctcttgggttcaagcaattcttttgcctcagcttccctagtagctgggatgacaggtgcccaccaccatgctcagttagtttttgtattttttttttttttttttttagtagagatgggggtttcactatgttggccaggctggtcttgaactcctgacctcaggtgatctgcctgcctcggcctcccaaaatgctgggattaaaggtgtgagccatatttacttacttatttttacatacaggtgtgagccatatttacttacttatttttacatacaggtgtgagccatatttacttatttttacatacaggtgtgagccatatttacttacttatttttacatacaggtgtgagccatatttacttatttttacatacaggtgtgagccatatttacttacttatttttacatacaatacaaacactttaaataaagttgaagatcatctccatggaccaggtggtcaagccgaacacccaggatccagctgtcaagttcagggtagcccctgagcttctcactctgactccaacagggtgagcttgctatccttgtggcacagggccttttgcattgtggatgatggagcggctcgtatagtccataagttttgtgcgtagctgtgtaccctgtccctgtgagctggttctgcccggcacctcggtgacctcgaggaaagaagctgaggtaagacctggcctgcctggctcctcgacttccttcctcagccctcaaattctggctcccacctcactctctaaatttatttttattttaaatttcattttagagacagagtcttgctttgtcacccaggctggagggcagtggcaccatcatagctcactgcagactcgaactcctgggctcaagggatcctcctgcctcggcctccaaaaatggtgagattatggacatgagacactgcactgggcctattgtgtatcttgttggcctaaaattgaaacatgccttgtgagcgtttactgcaacttcaatgagtgattattatgttgcctttaatcctgagagactgtattacttgtgcactttttttttttttggatagggggaaattagatttattccctatatgttttagaaaattgaagttttaaatatcagactcactagctgccctgatttaatctgttacaattaagtcagttaaaaaactcctccttggccgggcatggtggctcacacctgtaatcccagcactttggaaggccaaggtgggcaaatcacttgagatcaggagttcgagatcagcctggccaacatgatgaaaccctgtctcccctaaaaatacaaaaattagccaggcgtggtggcgggcgcctgtaatcccagctacttgggaggctgaggcaggagaatcgcttgagcccgggaggcagaggttgtagtgagctgagattgcgctactgcactccagcctgggcaacagagccagaccctgtctaaaacaaaacaaaacaaaacaacaacaaaacccccaggacttcctgtacccacattctagtggggaagacaggaagcaaattaacaaacatctaataactatttttaaaagccagatatacgatatttcacgtggatgacccgattggcctgctgcgggtcagggaaacaggctcccaggtcgcatcctcagcttgttcttggcgctggaaaaaagatgctacgcggttccctccttcagccaccagagggcgcgccctccccgtttgtcctctttcgcgcactttttctcccgcacctgtcagtcacagggcagccctttagcggaacagggatcctgttctgtgattttcctgagggcctgcctctcccagggagtagcgggctcctacgaacagtaatagcaaccataatgtagagaccaagagcagagttactgagttttatgctgatgtccaaagtcacagggcatttcatttttcttcttttttcctttcctttaaaaaaatgggctgggcatggtggctcacgcctataatcccagctctttggaaggccgaggcgggtggatcacccgaggtcaggagttcgagaccagcatggccaacatgatgaaaccctgtctctactaaaagtacaaaaaattagctggctgtggtggtgggcgcccgtaatcccagctactcgggaggctgaggcaggagaatcacttgaacccgggaggtggaggttgcaatgagccgagattgaaccattgcactccagcctgggcaacaagagcaaaactgtgcctcaaaaaaaaaaaaaaaaaaaaaagtgattgggtcgtgagagttctgttttcataaatgaattaatacattcatgaattaatgagttaatagatgaatgggttatcatggtagtaggactggtggctttataagaagaggaagagagactttagctagcatcctcagccccctcgccatgggatgccccatgctgcctcaacaccctgtagagtccccactagccagaaggctgtcaacagaaggaccccacagtttcagcctcagaactgtaagaaacaaattttgtttctttataaattacccagtttcaggtattctgttataagcaacaaaaaatggactaagacaggaatattactgggttaagaaataaaagtaaaaaagaactactattgatacatgcaataatctggataaatctcaagggcattatgctaagtgaaaaaaagtcaatctcaaaagatttcatactgtacaattccaattatataacttttttttttagacggagtcttgctgtgtcacccaggctggagtgcagtggtacaatcttggctcactctcactgcaacctctgcctcccagattcaagcaattctccttgcctcagcctcccaagtagctgggattacaggagtgcactaccacgcctggctaatttttgtatttttagtagagatggggtttcaccatgttggccaacctggtcttgaactcctgacctcaggtgatccacccgccttggcctcccaaagtgctgtgattacacgtatgagccacagcgcccagcctatataacattcttacaatgagaacacaacagagatggagaacagattggtatttgcaaagggacagatacagtgtgtttgtgtatgtgcatgtatatgtgtgtgtgcctgccactatagtggtaacacaaggggattcctttgtgggtctctatcttgattgtggtggtaggtatacaaatatttatatggatcagattgcatagaaacacacatgcacatgcgtgcacacacacacaggaatgcatgtgaaactggtgaatactgaataaggtcctctgtaatctagttaacagtaatgtacccatgtcactttcctggttttgatattatactatggttatgtaagatgttcccactgtgggaatactggatgaatgttacgtgggactgtatgtaccatgcaatttcctgtgagtctgtaagagttcaacacaaaaagtaattacaaaagaagaaaagaaaaggtgctggtgatgacaaggttgttgggaaaagggcttgtgcggtgcctgcataaactggccgtaaaaaatatgggacaataagttgtggaaagccacaggaggcctctgatgaggaaagccttctaattgccatcacgttcccatggccagagcgtgacctgctctcttatttacaagcactgtgctcaaggagaaagacactcctttgaagcattggaatgtggccagatatgccggctcctagttacgcccactccccacagctgctctccagtgagttaaagaataaatcagtagttaagtttatgctgcttcagcacaaagacaatttacctaaaccgccattgctatagattaggtgtatgacacaccgcccccctttcaccatttcacccctgaatatctgcttctcagatctaagtgattgtactcagtagtgtggagaccagagtttggcaccttttgcagcctccaaaagtgcagttggccccctggcaccccaccctttatgcactcttaacctgtctcttctcattccttcgtcgccaccggactttgggtaccctacgggtggtgttgaggctggtccccaacacaaggtgacagcagccatcccactccattagcaactgtggtgataagcactggtttaaaatgggctgaattgaaaactgttactcttgccttagtccagggattggcaaactttttctataagccccaggtagtaaatattttaggctttatggaccacatataatctctgttgcatattcgtttctctctctgtgtgtctgtgtgtctatgtgtgctttaaaatgttttataaatgtaaaaaccattattaactcattggctgtttaaaataggccacatatagtgtgtgtgtgtgtgtgtgtgtgtgtgtgtgtgtgtgtgcacataggtgagatttggtctgtgggttatagtttaccaacccctgctttatacaatatttctaaaggctggacatgttacgtcttctgactctggagttgttgacaatgtcttagccacctgttctgccacttggaagactatagaccagcagactaaagatatctctttataaggctgtgaactctggaaattcaatcacagctgctaatggaaacttctaagtccactagcagctgtgattcattattcatgtagatgctcatagtaatgatggcagcagtggcccgtctggagctgccactgccatcatgtgggctgcagtggggggcaggtggcacagttggggctgtacactccactagacggttggagctggggacaagtgggagccctgccccttccaagttggtggggcaggagctccccgggtgcagctgcagccacccaagtcatggctatggacccaggccttccactccatggagcaggcagaaaccccaccctcccaggtgcagctgcggctgcccaagttgtggcctccctgtgctcttggaggtgctgggagcaggcaggagccccaccttcctgggcacagctgtagctgcccaagtcatggctgcagacctggggctcccactgcatggaggccagagccccacccccccaggcatagctgcagccacccaagccatggctgcagacccaggcatctctgcactcttaggggcctgggaaggcactccctgccctcacaggcttagaagtgcctcctcctgctgcctggcttctccctgctgtcagcacccactgcaatcttagagcaaagttggggccgagcctaggcactgtcacagcctggctgggtgtgcacatacccggggcagtgctgacacaccagccccctgccacagccccctccagactttgggcaccgatgagcataggaggaaagctgagggggtgctgagggcagcttggtactggcctgcaggtgccctttggcataagcagcctgggcaccatggatggcagcaggaggcagacagcctcctgggcagaagggggcaggtcctggtgaggccccaccttgaggtcagggagggcctgaaggctgggggctgggctgccagtcccaggaccagaggatgaacctgtggtgcctttttggggcctattcatggccatctgtggagcaatcagcatgcacttcctcccctctgtggcccataaaagccccaggctcaaccagcacagggcagatgatgggacaaccagctgcagagcggagctatactttctgctgagagctggagcagatgatgggatgaccagctccagggaggagctaccctctctgttgagagctggacacttgttgggatgatctgcatgcagaaaggagctgcctgctgcaggagactgagctggtctattgctcagtaaagctcctcttcatcttgctcacccttcgcttgtctatgtacctcattcttcctggtcacaggacaagaacttgggacccactaaatggcggggctaaaagagctgtaacacaaacagggctgaaacatgccccttgcttaccacgctgcaggcaaagagaaggagacaagagctgtggcccttcagggagcccagacttgggagctccctgagccagggctatgactccctcttggggccctgcagctcctggtgtctccaggcatctggatgctaccacattccccagctccagccagggaagctgaagtgaggcaccgggtccagctgcagcctcgcagagagccggcaccatgctggcaccgggagctgcccgccccgtggcagcaactggcacgtctgactgcgcagtggctggaccccatgcttgctcacacacccctcgcagtcttccttggaggcatgggatcaaggccagtagtataagctgagtgcagcctgccaggccaagtgggcagaacgagcccagagggtccaagcaaaactcgggcaaaggtgccaccagccatgggtttctggccagaaaagcagcactccaaagatcctgtaacagtaaggacccattctctgatgagactgactggaatcaagctactgatcaaatttgcacaaccttcactgctgtcattgccatccggatccatcattgtaacacgctgaccttatggccatgcgaggagagcaaccctagcatctggggagagaatgccacatgctcacgaggcacggggaaggaagaacagtgctgtgttcgccccccagattcagcactgcagcccgaatcaagcaacagctgctgctgggtttgccaccccccacctacatgctatgaaaacagagaaactcgtttttcttttacttttcctttctttttttttttttttttgagatggagtctcactctgtcatccacactggagtgcaatggcgcaatctcggctcactgcaacctccacctcccagatttaagcgattctcctgtctcagccaacagagtagctgggattacaggcgcctgccaccacacccggctaatttttgtatttttagtagagacggggtttcaccatgttggtcaggctggtctggaactcctgaccttgtgatccgcccgcctcagccaaagtgctgggatcacaggtgtgagacactgtgcccggctgaaatatgtttttctgacatggctggtcctgaaccactctgttctgccttataccatcaatagcaccttccaaacgtggatcttcctcatatgtgcacaaacacatagactgatagacatcttgctttaatcggacatagaaatttatggctgggcacagtggctcacacctgtaatcccagcactttgggaagctgatgtgggtggatcacttgagcccgggagctcaagaacagcctgggcaacatggtaaagccatgcatctactttacaaaaaaaaaaaaaaaaatatatatatatatatatttatatatatatatatatggtagtgcatgcctgtagtcccagctacttgggaggctgaggtgggagaattgcttgggcccaggaggtgtgttgagatgagccagcatcgcatcactgcattctagcctgggtgatagagcaagaccctgtctcaaaaaaaaaaaaagctggacatgttgtattttaggttatgagactctggaaataatttaaatcttgttttagttggctctgtttgacaccactatagcaggggaaggaagttggggtgctgtctccactgccaggtcagggtagaagtccgggttcttgacagccttcattgatacctggtggggagagggtgaagagtgccttgatactgatgggttttgaaattcaggttccccttgtcgtccccactgatactgtgactctattcttggcactctctaaccttaacctggtgggataattaggattccttacagcccacaaagagactgaaaaaacaaaggtagaatatccaaggatgctgggacaactataaaaccggtaacaggctgggcatgatggctcatgtctgtaatcccagcattttgggaggctgaggagggtggatcacttgaggtcaggagttcgagacaggccggccaacatggtgaaagcccgtctctactgaaaatacaaaagttagctgagcgtggtggcacctgcctgtagttccagatactcgggaggctgaggcaggagaactgcttaaacctgggaggcagaggttgcagtgagccgagattgcaccactgcactccagcctgggtgacagagcaagactctgtctcaaaaaacaaaaacaaaaacaaacaaaacctgtaacattcacttaatggtaatattgatgacagcagtgggctgtctggtgtgaccgctgccatcacgctggccactgcagggagggtgcaggaaggaggtggacagcacttccacagctgcagtcttgggggctggcaccatgggattgggctgggtcgcctgtagcggggtggggagcagcgcagtgggagagcagtgccttcaggcacatcacaaagcattttcacagatagcttgtttctagtttttatggtgggataaaggggcctgatgcagatctggggccatgatttgggggcccgggctgggaagtgggagtggtgctctcttcagggtcccagccactggcgaagccactgtgccgaccttgctgagggtgctaggttcctggggctcaggagaaggatctgcactgcgccgctggggtctcctccctggtgtccacctgggcattggagtgattgccaaacctgtcactccaaatggcctggcccagggcccgtgatccactctgtcccaggccatccctgagtgccggggtaacgaggcagcttgtggcaatgtcgcccctaccccagatgccagcccaggcccagcgaggatcaggagtcccctccccaggctgtgagggggcacagccagagctacatgctccacagggcagccaggagccctgcccaagttgtggctgcagatctgagcctctgtgctcttggggggccaggagcaggcaggagccctgccttcctgggtgccactgcacctgcccaaagcgtggctgcagacccaggcctcctgctccatggagcaggcgggagcctcctcctgcccctgcagctgcagctgcccaaaccagcaactgcagcctcaggcattcctgcactcttgggagcctgagaagtgcccccctgcctttgcaggcttggaagtgcctgcttccgctgcctggcttctccctgttgttgtcgcctaccataatcttggagcaaagctagggctgagcccagcgggccatgaacagcagcaggaggcaaacagattcctgggtggaaagggccacgtccctggttaggcctcaccttcaggcctgggagggcctcatggctgggggctgggctgctagactcacaggccaggagcggggacttgtgattccttttctgggtgcccgtggtcacccatggaccaattggtatgcacttcctcccttctgaggtccataaaaacgatgggctcagccagaggagggcagaggatggagagatgactgaatgaccagctgagaagaggagccaccctctctgctgagagctgggaagatgacaggatgaacagctgcagataggagctctcctctctagggcctcctctttgctgagggctgaacacttgacaggatgacctgcctacagagaggagctacccactgtgggtctcttctgagctattctatcacttaacaaagctcctctttgtcttgctcaccctccatttgtctgtgtacctttcttcctggatgcaggataagaactcaggcaaaagtgccagcagccacagaggtttccagccagaaagagcaacaccccaaagattccataacaataccagaaggaaaaaaaaaaaaagaaatgaatggaagaaatgtttgaaacaataatgactgagaatttccccaaattcatgtcagacaccaaaccacagatccaggaagctcagagaacaccaagcaagataaatgccaacaaagcaagacctcatctcctgaaaggtgcttactttctgggagacacagatcccctcctggaagaggcccatgaccacacggcaggagttcctttccgagactgccaagcacctgtagcagtgcagaccctgagctctcttcatgcacagcagggccatcagcaggaccagggcaaaggtcttcatggcataggaactgctcattcttcctctcttgccagtcatttagtttcaataaactaaaatttgttcttagttttgtagcttaaaaaaaaactacaaataagccagtgcaatttccacaaccatgttgtcttgtacattttctgatgctataacagaagtggattggataatttaaaaagaacagagatttatttcttatggttctggaggctgggaagtccaaggtccaggggtccacatctggcaagggccttcttgctgtgtcaccccatggcagaatgcaaaagacaagagagcccatgcacacaagaggggaaaggggtctgaactcatcctttattttttatttttatttttttattatactttaagttttagggtacatgtgcttgtgcaggttagttacatatgtatacatgtgccatgctggtgcgctgcacccactaacttgtcatctagcagtaggtatatctcccgatgctatcccgcccccctccccccaccccacaacagtccccagagtgtgatattccccttcctgtgtccatgtgatctcattgttcaattcccacctatgagtgagaatatgcggtgtttggttttttgttcttgcgatagtttactgagaatgatgatttccaatttcatccatgtccctacaaaggacatgaactcatcattttttatggctgcatagtgttccatggtgtatatgtgccacattttcttaatccagtctatcatagatcgacatttgggttggttccaagtctttgctattgtgaataatgccgcaataaacatacgtgtgcaggtgtctttataacagcatgatttatagtcctttgggtatatacccagtaatgggatggctgggtcaaatggtatttccagttctagatccctgaggaatcgccacactgacttccaccatggttgaactagtttacagtcccaccaacagtgtaaaagtgttcctatttctccacatcctctccagcacctgttgtttcctgactttttaatgattgccattctaactggtgtgagatggtatctcattgtggttttgatttgcagttctctgatggccagtgatgatgagcattttttcatgtgttttttggctgcataaatgtcttcttttgagaagtgtctgttcatgtcctttgcccactttttgatggggttgtttgtttttttcttgtaaatttgtttgagttcattgtagattctggatattagccctttgtcagatgagtaggttgcaaaaattttctcccattttgtaggttgcctgttcaactctgatggtagtttcttttgctgtgcagaagctctttagtttaattagatcccatttgtcaattttgtcttttgttgccattgcttttggtgttttagacatgaagtccttgctcatgcctatgtcctgaatggtaatgcctaggttttcttctagggtttttatggttttaggtctaacgtttaagtctttaatccatcttgaattgatttttgtataaggtgtaaggaagggatccagtttcagctttctacatatggctagccagttttcccagcaccatttattaaatagggaatcctttccccattgcttgtttttctcaggtttgtcaaagatcagatagttgtagatatgcggcgttatttctgagggctctgttctgttccattgatctatatctctgttttggtaccagtaccatgctgttttggttactgtagccttatagtatagtttgaagtcaggtagtgtgatgcctccagctttgttcttttggcttaggattgacttggcgatgagggctcttttttggttccatatgaactttaaagtagttttttccaattctgtgaagaaagtcattggtagcttgatggggatggcattgaatctgtaaattaccttgggcagtatggccattttcacgatattgattcttcctacccatgagcatggaatgttcttccatttgtttgtatcctcttttatttccttgagcagtggtttgtagttctccttgaagaggtccttcacatcccttgtaagttggattcctaggtattttattctctgtgaagcaattgtgaatgggagttcactcatgatttggctctctgtttgtctgttgttggtgtataagaatgcttgtgatttttgtacattgattttgtatcctgagactttgctgaagttgcttatttgcactccagcctgggggacagagtgaaactctgtcacaacaacaacaaaatcaatgcagtataattaccaagtattagattctagagtgatctgtgactctgctaccccagaacagtctagatgaggtcagatcttgacacagggctttttgggtggtattcctgcagaaggagagaagtgggagaggggaataagagggagggtggtagcagcagtggcggggaaggaacagagacatggagaaagacagagttgcatggttactgagagatgggaaggtatggaacccagcagagactgcacatctgggtgggacatggacaaccaagctccattccctactcccccctcccacagcctggactggagtcagatccttacctgggcacagatcctggtgataggggaggacttgcaatctggcttcatgcctgggaccttgaacctcacaactgtctggttctgagagcccaaagactccaggcagcagtgctggaagcagggccagaaggtgcagctggagccgcagagccgggtctggttcaagtctaggatgacaccgtcatcacagcactgctccaaggggttgtaggtccactccccgcacctgggcgctggctggcatagccacagtctaagatctggaagagtcggggctggatgggctgcaaggaccagcctaggaccacctccccaccaaccttaatgctgttctctcctccctcactgcatctgttctcacctgtgactccttctgagtttgaacccaaaagttcaaaaatgaagatggcagctgagaagcagaaggagagcgagaatgattctgaggtcactaggtcttgaccacggggcacaggatgatgtctctgagcttctctggttgctgttaacagctcagagtggattttgggactggctgtgggtgcaggtcctggggactgggcttggcaggtgaggaaaggcagggagggctctgggaaaagttaagcttctggaatttgcagttcaggagacagattacaatgcagtcacagatgacatagcagtgattatgaggtgggacaccaataattaaatagggaagagagaattaactttgaagttcagaaataattagggatgtgatatcattagggattagcttagcctagggctggggtctccttaccagaaattctgggcaccatgggttaggcttcagagcagcggacgagggagcagcagtggaaatgggtcagtgactttacataggggcttatataggatatgaacttaccgccatttagggaggtgtgcagaaggagtggtttcttgggaagagttaggcaaaaagagctgcagggaacataaataattcatcaaaagcttaatgagatgcttctggacctgttccaagtggttgctgcctcctcagacccttcagatcctcagggtaaaggctacccaggaacctatctaagctttgactctgctgagtgtctttctttgaacaccgcccaagggaaaaccacttggaagatattccttaactcttgcttatctaagatcaaattactcaccaaacaccggctgtctctaggctccccatattcctccaccctgaagtttcaaggagtccctctactccccgtctcagttcacctgcagacctgcactgtctataatttttcagagtcacgtaggagaatttgtgaagttgcagcataatctagaagaacagcaggggctgcaaaactgtgccagggagaacaacaacaacaaaaataggcggtggtaggatggatctctgggattccagataggaaagcagcaccttttttttttttttggtttgtggagtgccttgtccaagaaaatgctcctgtgtgtctcactgtgtgatgggattacatgtggcgtatttttagagcatgcccctccattttccactggtttcttccctgtgtcacagtgagaagggtgggagggtgaaagaaggataaggcacaggtattagagctttgtaaaagtgcattgttagtatagactctctagagtctcttcctcctccctcctctctctctttttttttttttttttttgagacaccgtatctctctgtctcccaggctggagggcagtggtgctatctttgctcactgtaacctttgccccccaagttgaagccatcctcccacctcagcctcttgagtagctgggactacaggcaggcacctcctggcctggctaatttttttgtatttttcatagagttagggtcctacaatgttctggtcttggaatcctgagctcaagcaatccacctgccccagcctcccaaagtgcattgattttgttgttgttgtgcttatttgcactccagcctggcctctcctttcttgactggatgtccaagtcttcggtattgatttcatgcaataaactagctctcctcgcctatttctgcagttgcgtatttgcatagatatgtctgtttgtctgcttatcaatatgccttctcctttcccacacatccaaacagaaatcccacctgtaaagacacattctctcacctacacagaacagctgctgcggaaacagacctataagaactacattcctgtttatcaagttaagtagtgtgaataccgcattataactccgagccagcaaccaagaaatttatgaccacttgaaagggaaagctgcaatgaagagtacaagtgactaaggagggaaatcccaaagctgattactagaattgatctctgtataattgaactatctatgtagaaaatcccacggaacccactgtcaagcaagaggtgagtctgacagattctgttagtgacaaaaacaagctctttttagattcagacactttattacttacacagacagggaaagaaagagccacaggtgccagcaccatgtcccttatacagggtgacactgaaacaaaagggccagatgactgaacaagaataataggatgcctgttgctgagtagagaatccagcctgtggctccatggtatagggaggtagaaagcctcatccctccctagaagccagaggcagtgagaagctgtgtcatggcggcctcccttatccatagggaagtgagtgacaagtgatgctgtagcagcttcccacaagcctcccatgacctcacgttctgggaagaccagagagtgttctgccatgacatacatcagctacagttaatttcaccaacgtggcccacgtggagatgtttgaggtcgccggggcagtagggcagagccattaccgtaaacctacccccaaagctccgggaactaataagtaaatttagatggttgtagaatacaaagtcaacacacaaaaatcaattgtatttctcgctcctggaataagtggaaacaaaaatttagaggggaacaatgccatttataatgcccccctactgaaattgaatacttaggtatactgtaaatctaggagaacatgtagaggatatatatgcttaaaactataaactagtgattaaagtaatcaaggaaaacctaaatatagagtggtatatcatgtcatagtttagaatatggggctttttagctaagatgtcaattctctccaaattgtctacagatttaacacaattccaatgaaaacccaagcaggatttgtctcagatagaagcaaaataattctagaatttatctggaaaggcagtggaaacaagaatggcccaaacaattttggttgatgaaaaatgttggaggactcacactacccaatttcacaattactccagctacactaatgaagacagtatagtattggcaagtggagagatacatagatcaatggagcagaacagatttcagaaataaacccaaacaaacatggcaaattgacttttgacaaagatgcaaaagcaattcaatgtgggaaaagatagtcatttcaacaaatggtgtgggacaatgggcatgcatatgaaaaaaaaaatcttctaccaaagcttacacttcctacaaaatttaactccaaaatgatctagatataaaaagttaaactatacattttctagaagaaaacataaaaaaaatccttatgacttagggaaaagatacaaaaaacattgtccatttaaaaaatggatagatcaggaagcgggcaagatggctgactagaagcagctgtggtccaccgcactcacagagaggaatgaaaggagtgagtgaattcagcatcttcaactgaaatatacaggttgtcactctcaacccatggagaacgaagaaatgcagggtagggtgatggtccacccaggagcagtgtggaggtatggggactcctgcccccagccaagtgaagcagtgagtgattgtgcaaccctgcctgggaaaccatgcttctcccatggatatttgcaaccttaggatcaagagatccccacataagcccacgcccagagatttgggtccaatacacagagctgtgtggagtcttggcagagcggccacaggggcactcacagagacccaggagttttacgtactctggccctgggatctgcagcaagggaggacatccctccatacatatttctatgaagggggctgaatccagagaaccaagcagtgtcattctgtggaccccacttccacagcacctcacaagttaagacccagtggcttggaattccagccagccaacagcaacaggccggagtctgcctgggtcaggaccaagttcctggggtgggggtgtcgtgggggcagtcaccatctctgtggttcagtagactcagccattctagcctgccagctttggagaatacaaatggtccagatgaggaagggttccccacaacacagcacatctgccttgccagattgtagctagactgcttctttaagtggttccctgaccccattcctcctgactgggtgagacctcctaacaagggtctccagccacctcctacagggacgtttgggtcaacaactggtcagaggaaggagcaggctgccatctttgctgttttgcagccttcactggtgacaccttcaggtacgggaaaaacggaggcaaccagggtcttgaacaaacccccagcacaccacagcagccctgtggaatagtggcctgactgttaaaagaaaaacaaacagaaaacaccaacaacatcagcaaaaaagaccccacagaaacctcattcaaaggtcagcaacttcaaaaatcaaaggtaaacccacacagatgagaaagaatcaatgcaaaaatgctgaaaactcaaaaagccagagtgcttcttctcttccaaatgaccacagtacctctccagcaagggcacagaactgggctgagaccgagatggctgaattaacagaagtagttttaagaaggtgggtaataggccaggcgcagtggctcacacctttaatcccagcactttgggaggccgaggcaggtggatcacgaggtcaggagttagagaccagcctgaccaacatggtgaaaccccctctctactaaaaatacaaaagttagctgggcatggtggcacatgcctataatcccagatgctgaggaggctgaggcaggagaatcgcttgaacccgggaggcagaggttacagtgagctgagatcgcgccactgcactccagcctgggtgacaagagtgaaactctgtctcaaaaaaaaaaaagaaaaagatgggtaataatgaacttcactgagctaaaggaggatgttgtatcccattgcaaataagctaagaatcatgataaattatacaggagctgacagaatagccagtttagagaggaacataactgacccaatggaactggaaaacacaagaacttcacaatgcaatcataagtatcagttacagaatagttcaagcagaggaaagaatttcagagcttaaagaccgtccttctgaaattatacaggcagacaagaatagagaaaaaagaacaaaaagaactgaacaaaacctctgagaaatatgtaaagagacagaatctatgactgattggggtacctgaaagagacagggaaattggaaccaagttggaaaacatactccaggatatcatccaggagaacttccccaaacttgcaagacaggccaacattcaaattcagtaaatacagagaaccccagtgagatactccataagaagatttaccccaagacatataatcagcagattcttcattgtcgaaatgaaagaaaaaatgttaagggcagccagagagaaaggccaggtaacctacaaagaaaagcccatcagactaccagcggacctctcagtggaaatcctacaagccagaagagattgggggccaatattcaacattcttaaaagaatttccaacccaggatttcatatccagccaaactaagcttcataagtggagaaataaggtccttttcagacaagcaaatgctgtgggaattcgtcaccaccaagcctgccttgcaagagctcctgaaggaagcaataaatatggaaagggaaaacctttaccagccactacaaaaacacactgaaatacacagacaagtaacactatgaagcaaccaacaaaacaagtctgtaaaataaccagctagcatcatgatgacaggaacaaattcacacataacaatactaaccttaaatgtaagtgggctaaattcctgaattaaaagacacagaatggcaagttggataaagagccaagacccattgatatactgtcttcgagagacccatctcacatgtgggacacacataggctcaaaataaagggatggaggagaaatttatcaaggaaatggaaaacagaaaaaagcatgggttgcaaccctagtttctgaccaaacagactttaaaccaacaaaaatccagaaagacaaagaagggtgttacataatggtaaagggatcaattggacaagaagagctaagtatcctaaatatatatgcatccaatacaggagaacccagattcataaagcaagttcttacagatctacaagagacttaagactcccacacaacaatagtggaatactttaacacccactgtcaatattagatcatcgagacagaaaattaacaaagatattcaggacctgaactcagctctggatcaagtggacctgatagatatctacagaactctctaccccaaacaacagaatatacattcttctcattgccacatggcactcactctaaaattgatcacaaaatcagaagtaaaacactcctcgcaaaagcaaaagaactgaagtcataacaaacagtctctcagaccacagcacaacaaattagaaatcaagatttaaaaattcactcaaaaccacacaactacatggaaactgaacaatctgctcctgaataactcttgggtaaataatgaaatcaaggcagaaagcaagaaattcttgaaactaatgagaactaagagacaatgtacccgattctctgggacacagctcaagtggtgttaagagggaaatttatagcaataaataacccacatcagaaagctagaaagatctcaagttaacaacctaacatctcaactaaaagaactagagaaccaagagcaaaccaaccccaaagctagcagaaaacaagaaataaccaagataagttattggttaacagaaataagcaataactgaaggagatagaaacacaaaaagcccttcaaaaaattaatgaatccaggagctgtttttttgaaaaaatttataaaatagatagactgctagccagactaatgaagaagaaaagagagaataatcaaataaacataatcagaaatgacaagggagatattaccactgaccccacggaaatataaacaaacatcacagaatactataaacacctttatgcacataaactagaaaatctagaagaaatggatacatccctagacacatacaccctcccaagactaaaccaagaagaaactgaatccctgaatagaccaattatgatttccgaaattggggggtaataaatagcctaccaaccaaaaaaagcccaaagttggaagcattcacagctgaattctaccagaagtacaaagatctggtacaatttctacggaaactattccaaaaaattgaaagtgagggattcctccctaattcatcctatgagcccagcatcatcctgataccaaaacctggcagagatacaacaaaataagaaaacttcaggccaatatccttgatgaacatcaatgcaaaaaacctcagtaaaatactggcaaaccaaatccagcagcacagcaaaaagcttatccaccatgaccacattggcttcatccctgggatgcaaggttggttcaacatacgcaaagcaacaaatgtgattcatcgtataaacagaactaaaaacaaaacacacatgattatctcaatagatgcagaaaaggcttttgataaaatttaaacatccctttatgttaaaaactctcaataaactaagtattgaaggaccgtacctcaaaataatagaagccatatatgacaaactcacagccaatatcatactgaatgggtaaaagcttgaagcattccccttgaaaactggcacaagacaaaaatgccctctctcaccactcctattcaacatagtattggaagttctggccagggcaattaggctagagaaagaaataaagcgtattcaaataggaagagaggaagtcaaattatcttgtttgcagatacataatcctatatctagaaaaacctcatcatctcagcccaaaagcttcttaaggtgataagcaacttcagcagtctcaggataccaaatcaatgagcaaaaattgctagcattcctatacaccaacaacaggcaagcagagagccaaatcacgaatgaactctcattcacaattgctacaaaaagaataaaatacctaagaatacagctaacaaggaaagtgaaggacctcttcaaggagaactacaaatcactgctcaaaaaaaatcagataggacacaaataaatggaaaaacactctatgctcatggatgtgaagaatgaatactgtgaaaatggccatactgctcaaagtaacttatagattcaatgctattcccattaaactactattgacattcttcacataattagaaaaaactattttaaaattcatatggaaccaaaaaagagcccaaatagccaagacaatcctaagcaaaaaagaacaaagccagaggcatcacattacctcacttcaaactatcctacaaggctacagtaaccaaaacagcatggtactggtataagaacagacacataggttgatcaatgcctcctggtctctgatggccatggctgggaatctctctgtacaaaaagatgacagataggaggcaggactaacttgcagctcccacttggagggacagagaagcatgtggagacccacatcatgaaatttttctccaagaacaaccacaggaacataccaggaaagctgagagaatccagagaccctttaaaggaggtggattgctgctgcagattatgtgggacaatcaagaaactgtgagtttgcttgctttctcagctgggaggcttgtagcctggggcaagttctcagtcctgctcactggctgcctggaaataaacttggtgctgttaggggggcatagtgggagtgagactggccttttgggttgtgggctgcatgggagctgggtgaggtctgtgattgctggttttccctcacttccctggtgacctatgtgatgcagcagagatagccataattcccctgggaacataactccattgtcctgggaaccacacccccatcccctatagcagccacagcaagtccccgccaaggagattctgagctcagacatgcctaatgctgcccccacctgattttctctatcggccctgggagcagaagacaaaggacacagtctcttgggagctctatagccctgcccatcacctgagaaacctgaatactcattcaaaggtgaccctagggcaagtttgtatcctccccacacaaccacagctgacgcgctcttaaaagcgccacctcctggctggaggccaaccaacacaaaccagtgcacttaacacacatacagccaaggaccctcacagagtccacttcactcccctgctacctccaccagggtaggtgctggtatccacggttgagagacctaaagacggatcacatcatgggactcttcgcagacactccccagtaccagcctggagtcctgtagctccactgagtggctggatccagaagagaaataacaatcactgcagttcagctctcaggaagccccatccctaggggaaaggggagaggaccacatcaaggaagcacccctctgggacaaaagaatctgaacatcagcccttcagcctcagatcttccctctgacatagtctgcccaaacgagaaaggaacagaaaaataattttggtaaatatgataaaacaaacctctttaacacccccgaaagatcacactagctcaccagcaatggatccaaaccaagatgaaatctctgaattgccagaaaaagaattcagaagatcgattatgaagccaaccaaggaggcaccagagaaaggtgaagtccaacttaaagaaataaaaaaagatacaggatatgaatggaaaaatctccagtgaaatagatatcataaataaaaaacaatcacagcttcttgaaatccaggacaaacttagagaaatgcaaaatgcactggaaagtctcagcgatagaatcaaacaagtagaagaaagaacctcagagcttgaagacaaggctttcaaactaacccaatccaacagagacaaagaaaaaagaattttaaaaaatgaacaaagtctcctagaagtttgggattatattaaacgtcccaacctaagaatagttggtggtccggaggaagaagagaaatctaaaagttttgaaaacatatttgagggaataattgagaaaaacttccctggccttgctagagatttagacgttcaaatacaagaagctcaacggacacctgggaaactcatcacaaaaagatcatcacccaggcacatagtcaccaggttatctaaagaaaagatgaaggaaagaatcttaagtcctgtgaggcaaaagcatcaggtaacctataaaggaaaacctgtcagattaatagcagatttctcagcagaaaccctacaaattagaagggattgaggtcctatctttagtctccttaaacaacgcaattatcagccaagaatttttcattcagtgaagctaagcctcataaatgaaggaaagatacagtctttttcaggcaaacaaatgctgagaaaattcactactaccaagccagcactacaagaactgctaaaaggaggtctaaatcttgaaacaaatcctcaaaatacaccaaaatagaatctccttaaagcacaaatcttacaggacctataaaacaataacacaatgagctgggcacagcggctcacacctgtaatcccagcactttgggaggccaaggcgggtggatcacctgaggtcaggagtttgagaccagcttggccaacatggtgaaaccctgtctctactaaaatacaaaaatcaggtgggcgtggtggcaggtacctgtaaatcccagctactcaggaggctgagacaggagaatcacttgcacccgggaggcagaggttgcagtgagccgagatcgtgccgctgcactccaacctgggtgacggagtgagactttgtctcaaaaaacaaaacaaaacaaaacaaaaccaaaaaataataacacatgatgaacatgtagtattgagatgtgagaatagtacctcacatctcaatactaatgttaaatgtcagtggcctaaatgctccacttaaaagacacagaatggcagaatgcataagagctcaccaaccaagtgcgtggctgtcttcaagtgactcacctgacacacaaggactcacataaacttaaggtaaatgggtggaaaaagatatcccatgcaaatggacaccaaaagggagcaggagtagctattcttatattagacaaaacaaacttcaaagccacagcagttaaaaaagacaaaaagggatattatataatgataaaagaactagtctaacaaaaaaatcacagttctaaatatacatgcacctaacactggagctcccaaatttataaaacaattagtactagatgtaaatactgagatagacagcaacacagtaatagtgcaggacttcaataatccattgatagcactagacaggtcatcaaggcagaaggtcaacaaagaaacaatggacttaagctataccctagaacaaatggacttaacagatatttacacaacattctatgcaacgactgcagggtatacattctattcagcacagggaacgttcagaattagcttagaccataagataggccacaaaacaggtataatagatctcaataaatttaaaaaaatcaaaattatatcaaatactctctcagaccacagtggaataaaattggaaatcaactccaaaaggaaccttcaaaaccatgcaaatacatggaaattaaataacctgctcctgagtgatcattgggacaacaattaaagatagaaattgaaaaattctttgacctgaatgataattgtgacacaacctgtcaaaacctctgggatacaacaaaagcagtgtagcattaaatacctacatcaaaaaagtctgagcctggccaacatggtgaaaccccatctctactaaaaatacaaaaattagctgggtgtggtggcatgtgcctgtaatcccagctactcgggagactgaggcaggagaatcacttgaacccaggagtcggaggttgcagagagccgagattgcgccattgcactccagcctgggcgacaacagtgaaactccgtcaaaaaaaaaaaaaagtatattaatcccagcctaaaaaggcagaaatatcaattgctttgcagacatgaaaactattaacacatacttaaaatgtacattacatgttttattccctagaattctacaggtatttatatgttatctcgttttttttttttttttggaaatgcttgctactctgtatcagcaaacatcccagggctcgaagtagtgggaattgaaaagctttgggagaagtcagaaaagaaaaaaaaaaaaaaaaagcaggaggaaccctcggtggaaagtatgcatagacagtaaacatgccaacggaggcccatctgtttctgtaccctttatgcaacatgtctgtataattggggataggcaagttgtataattggggttggctaataataacaattatttgaagtggggaatattagtcacttacactgcaatatagccagggtatctgtgttacttcacttggttctgatttaaatgatctgttttgttttgttttgtttgagacgttgtctcactgtgtcacccaggctgaagtgcagtggcatgatctcagctcactgcaacctccacctcccaggttcgagtgattctcctgcctcattctcccgagtagctgggattacaggcacccaccaccacgcctggctaacttttgtatttttagtagagccggggttttaccatgttggccagggtggtctggaactcctggcctcgagtgatcccacctacctcagccccacaaagtgctgggattatataccatattttctttattcattcgtctgctgttggacacgtaggttgattccatatcttggttattgtgaatactactgcaataaacatggaggtgcagatgtctcttagatatactgatttccttttttgtgtgtgataaatgcccagtagtaggattgctggatgatatagtggttgtttttatagtttttaaagaacctccatactgttctacatagtggtggtattaatttacattctaatcaacaatgtgtaagagttcccttttctctgcatccttgccagcattattttttatctttttgataatagctaacctaactcaggtgagatgatacctcattatggttttaatttgcatttccctgatgattagtgatgttgagtagttttttcatatatctgttgcccacttttatgtcttcttttgagaaatgtctgttcagatcatttgcccattttaaaatcaccttgtttgtttttgctattgagatgtttgagttttttgtatattctggatattaatgcctagtcagatgaatagttttcaaatattcttccattctataagtcatgttttcactctgttgtttgttgtgcagagctttttattttgatataatcccatttatttatttttgctttcattgcctgtgcttttgaggttttattcataagatattttctcagactaatatcctgaagcattttccctgttttctactataagttttgtagtttcaggttttacatgtaaatctttgaatcattttgagtttatttttgtatagggtgatccatgggagtctagtttcattgttctacatatggatattcagtctccccagcagtatgtattaaagagactgtcctttccccaatgagtgttcctggcacctttgtcaaaatcagttggctatagatacttggattaattttcaggttttctgttctgttccattggtctctgtgtctatttttatgccagtgccatgctattttggttacgacagcttcgtagtatattttgaggtctggtagtgtgatgcttccagctttgttctttttactcaagattgctttggctttttcaggtctcttgtggtgtactttcatatctctactttctcaataatacctcaaaagccattttttttcatatgatgcccacaccaaagaataaacaaagacataaatacctcaaggacctaatacctaaaaaattgagcctctgtaatctcaaagagaaagtaagaacctgagggttccaagggaagatgaatgtgaggaaaacagtgagtagcctagagataaaggaatagaagatctatagtcttcaaagttggaagataaaggaagatggccttctgtcttcaagaacaaaatttgaaatggagggaatcagccctggagctattgctgatgtgtttgccaaatcaatacatccctttatcatccttcagtatgggtatttatagggccacttgaagagagcctatagccaacttggacatctttggtgtcttggtgactaaggagggaaacccagtttctctcaaaagggaaatgaagagaactgctgtatatgtcccctatgaaccatgggagcagtaagtaaaacttggtaaaggtcatcaaattagttctgccaggctctcacctgtgactgtgaaggcacctcatgtaaagtaacatgccttcctgggaatggcatttgataacagcagatttgttctcagtaatatgttttcttttcatttcatttcttttctgttcttttccagatagggtctcactgtgttgcccaggctggcctctaacttcaggagttcaacagtttctcctgcttcagcttcctgggtagccaggacaggtgtgtgccaccaggctaatcttcagtaacgtgttttctttgatctatcattgcatgttttgttagcctcccatggctggattgaatcttgaatacctcccatgatcttatcacacccatcttaactagaatatttccattcaacattgtggccacaaattttccaatcttttgaaatgaggtcaaagctcttcatttgaatttgcttattagtgtttacctatattgaaaaaaaactacatcattaattgcatccttcagttctggtccttataagtggaaagagagctttagagatacttggaaagatcagaatgtagaatcatagatatttacactttgttctcaatattttacagctgaatggtaaaaatttaatttgacagcaaaaagttttgtgagagctcagtttaatttttttttttgacgaagtcttactcattctgttgcccaggctggagtgcagtggcatgatcttggctcactgcaggctccacctgctgggtttaagtgattctcccgcctcagcctcccgagtagctaggattacaggtgcccaccaccgtgcccagctaatttttgtatttttagtagagacagggtttcaccatgttggccaggctgatctcaaactcctgacctcaagtgattggcctgcctcagccttccaaagcgctggcattacaggcgtgagccaccatacccagcccaatttagtttttatataaaggtggcataaatggtaacaccatctttcaaccttgaactttccaaatgcaatcaataggacttgcagaagtaatagggaatattaactaaactaaggctgtgctacaccatgtggtttaactttagattaattgaaattaaataacatgaaaaattcagttcctcagctgcactgttcacatctcatgtgctcaattgccatattgtctagtggttacaacattagacatctcagatacagaacattctgatcattgccgaaagttccattggacagctaattagagtcccttatatgaagttcacctcaggaggctcatactggaattaagaggcatttcaattattctccaattccatcttgtactgcatcaatgtgccccagcaaggatctcctccactcgctccctatgtatccagggatcccctggagttttagtgtctgctgtgacattctggagatgcctcctgatgaattggaaaaatactgacatgggtgaggtctggtggtcaagaattgttggatgcttgccagcccatgaatacacaatggatacacagagagacgaggaggagtcaggaatcaaaggcaatgaaatatttccacttagggctgcaagcccgtccaggcaagtcctccctttgagctggaattctttttacatctacccagccacagaagacagaaatggagcccattacgtcatttctcaacttgctattcctccagcatattccttgcataagactccctgtaggatctcaccgaaggaggacacaaattcctgaaacctttgacctgaccctcttctctccctatacaccccagtcactcacttttgatcatgtgcaccctctttgtcttaggcttcagagtcccaaaggctgttattttcttcctttctggacaataaggtagaaaaatttgaaaatatgtgaagatctccaaggatttgatacaaatgaccaaaagtacatctgaatatgagaactttgacttttctttcaacttatgtagtaataagtacccattaaaaatgttaaagaatcagtctcaacatattaaaaaccttgagacttaaatatagaaaataagaaatacttcttctactattttcttatgtttttttcttgtggggcagggaggtagtggactcttaagcttaggagtctagagagggcaagagaggctcatttttagagtaaaaatattaaccacatttttcctcagggctgaggaaagaatacaccaaaatatagctgtggtttataactggatttgagttggctgtgaaggggaatttgaaactttttgtatccagaaacatcaatggatacgattttagttccccataaatcagccgtgctaacattcatgtataataataattattattttttaaagtgaaagcaagtttattaagaaagtgaaggaataaaagaatggctactccataggcagagcagccctaagggctgctggttgcccatttttatggttatttcttgattataagataaacaaagtatactagtctgctctcatgctgccaataaagacacactcaagactgggtaattgatagaggaaagaggtttaattgactcacagtttcacctggttgaggaggcctcacaatcatggaggaaggcaaggaggagcaaagccacatcttacatagtggcaggcaaagagagagcttgtgcaagggaactctcatttataaaaccatcagaactcttgagatttattcactaccatgagaacagcatgggaaagacccgtccccatgatttaattacctcccactgcatccctcccatgacaggcgggaattatgggagctacaattcaagatgagatttgggtagggacacagccaaaccatatcattctgcccccaacccctcccaaatttcatgttctcacattttaaaaccaatcataccttccccacagtcccccaaattcttaactcatttcagcataaacttaaaagtccatagtccaaagtctcatttaagacaaggtgagttccttccacctaggagcctgtaaaatcaaaagcaacttagttacttcccagatacaatgggggtacaggtatcgggtaaatacacccattccaaatgtgacagactggccaagatggaggggctacaggccccatgcaagttagaaatccagcagggcagccaaatcttaaagctctgaaattatctccatggacaccatttctcacatccaagttatgctgcaagaggtgggttcccatggtcttgggcagctctgcctctgtgtctttgtggctgctttcactcctggtgttgagtgtctatggctcttccaggtgcacagtgtaagctgttggtggatctaccattctggggtctggaggacgctggccctctcctcacagccccactaggcggtgcctcagtggggactctgtgtggggtttcaagcccacatttcccttcttcattgccctagcaaaggttctccatgagggcgctgttcctgaagcaaacttctgactggacatccaggcatttctctacatcctctgaaatctaggcggaggttcccaaacctcaattcttgacctctgtgcacccgcaggctcaacaccatgtggatgctgcctaggcttggagcttgcaccctttcaagccatggccccagctgtaccttggccccttttatccatggctagagcaactgggatgcaggatatcaagtccctaggctacacacagccaaatcatatcacaaggggtggattattcatgaattttccaggaagagtgggcaattcccagaactgggggttcctcccctttttagactatatagggtaattttctgatgttgctatggaatttgtaaactgttttggtgtgggtaggagtgtcttttagcatgctaatgcactgtaattagcatataatgagcagtgaggacaattagaagtcacttttgttgctatcttggttttggccggcttttcttactacaacctgttttatcggcaaggtctttataagctgtatcttgttctgacctcctatctcatccggtgagttagaatgccttaaccatctgggaatgcaacccagcagttctcagccttgttttacccagaccctattcaaggtggagttgttctgattcaaatgtctctgacatttcccccctcccttttacaaggcaactcttaatcctaagggttgtggaaggatgaagatccatattctgtaacttcttcaggctgaataggggcaatgctttcctgcctaactgttagggtctcttgtattcagggtagagaggagctcagaaagcataattatggtgagggtcacttgtaactccgagttctgacaaaaggtggtatctgtcttgtttattctgaactgcaaccagagatcactggttggctcacaggaataagcagtcagtctaaattgcagaagaaaaccctcaaaaacaactgatgagattagaatctaataacaggtgtaccatagttcttgaaacataatttttctctctccagtctcccattttttactaaagacaaatcatggcaaaaccaatttgctttattatacttggcctaattatttgtataaagtgcagcaataataattatttttcacagaggcttttaaaattgactttgatggaactgtgtttcataaaatgaatctcagataagactttttaaaagctgagcccagccgtgagtttgcaccctcaaatacctgagttgggtaaattcctctcctcttgaggtcccaagataacctggggctcctgggccaatcagaaagtgacattctttacttaccacaggtcgggaaccctgtacagggactgtgtagacaaggcatgaggccaggtttcccaaggggcttttattggctttataagtcaagtttgattccttaaaggaaaacataccattccaatcaaagctttggtaaaatcaccagtttctccaattgtgtctgtttgcaaaagaaaacagatccttattgtacttatgcaaataactatattgctataagttaagaatactcacaaatagtttccaaattttggagaaatcaggcagagagaaacaaatatgctccaaattttgttcacaggagttaagctgtcagtagctcaaaagaaaagtttccttgactctgaaaaacaaaacaaaggatccgcaacattttaagcaaaaagccgaaaaagatcacctcagtcctctattagttcagtccatacagataacttctgttctgtttgatattcatgaacatttcagctctccatgagagtcctgaaagttttttcctgtattctaatgtcacaatctccaaagttatcagaaaacctgcatttaagaatatctgctagagtcctatagctgattacaaaccaccttttgaagaggattaaaacaagaaagcaatgatctgtggatgacataaagtcttaggacagccatagtcaaagatacgattgacaaagatatttggttaccttgtggcacacaataatttaacataacaattgtaattattactgataatgtacactaagttatattagaataataagagtttctcatgatttgggaacacataccaatacatatttacacaaatacagcccaaagaaagccaaacatcatttcatatttgacagtgtttcttgtatgatttttgtatcaaataagccaaatgccacctttgcattagtgtactattaatgttaaacctaattcttaataaaattttatagacaaatctatttaaccttaatcagtttgaccataaggtaagattctcgtaaactttttattaacccttaacagattttctttaaaaagcagatcagtgctctaagataaaccttttgtacttttattccaatgttcaattcatggaaaaaactgagtaatacccctttaactttagccaacatgttcatacacagaatttctttcacaagatcaatttttcacaaacctttcataacttgcttaaaccttcagctttattctatcttaaaacttaaaacaatccttcaaccctttaatctaggcaaaaacaatccacattcccatgccttcttataatcttttaccaaaaacacatttcacttttttacacaccttgcatgtaaaactttttttcctgaagattacataagtcacatgaactaaaaggcattatagtttttgtttttctgagaaaatatttgatataagctcttattatttttaaaccaattaattaaagctcttttatataaacattacacacaacacatgtaaatacacagacagacagaagaagatccagtagttgtaagattgttcatttgccagtttgttaattggattactggcagggtggagcctttggaggaacagggccaggaaagcatgcagtttctacagcctaacaagcaggcacagctggaaggcaaaaacagatccccaaaaattaagggcctcatttttacaccaggtcctggatccccaaaagaaatgctatagaacaagacagtacaataattttaccatgcatttaattgctaggcaacccaaagtcaatcagcccattctgtgattaacccatcccccataggagtcttatgtctgggtggggggaaagggcatttccatactttttaggtggtcaagagcatgcttttctgttccaagaaaaagcaaagcgccatatattcccaaaccactgccattagttatttaccaaagtatatttcctatctagttattacacaccagagttctctcataatgcaaagtaatttctgatattcccccaaatcaaaaccatcacataacacaatgcgaaacagaacagagtcttcgattttgagaggaatctatccacttttaattcctagggtttcatgaggaaaacaggtttttcccaaaacgtggtctgtagcacttcctgtttttcccaaggagttccatgatgctagagcttgaaaaagctgacttttaaccatagtgctcttaaaaaatcctttaaaatttcttattacccaactttagccaggccaaactgccaatatttctggcttttgaactttaccaaaggaaaaccttccaaatgctccgagaaaggaaaattcaagatggttggtggaggggaaaagaatcaacaaatgatgaaggtcacacagatataaaccagaaagcactgattccctaagccaggattgaacccaggacaccattggagaatggcacagccttacctactgagctacagcactgagcagtttctgctgcttttcccagaaggagcctagagcagccaattttgagcttgcacaggcttttaagtgctcaagatagtttttagagttaactgtgatatgaacccctaaattcatgttccctggaaggtagagccaggagaaagtactgccacatcgttacaaggttaagctcccaaggacatctttcaacatgtggtctctgggcaagatgaaggagcagacagttgtcctgagtaacagaaaagagagaaaagagaaaggagagaaagggagaaaagcattgcctgtggcagggtagggaaggcaaagaactcagggaggccagagaaagactcacccattgcagccacactgaatcaaaagtttaggccgccccttcttggttgcgaaggaatcttttccagcagtcccatcagctctcaagtttccccctttggggagaagaaaagttccccatgtcctattgtcccatgatcctgtacatgcctaatcctgtcacccacagccatcagcaaagagtgcaaggcagattaatccaaagagaatagcacttaacatcctgtagtgccaaacctgttcttagcacatagagagggactttactgagaggggcctccatcctcttaagtcttaggaaggattctaatctgcctaagatgggccttgaacccaagttcggtcaagcgtccttgcctttaattaagaacgacctttactcatgtatgattatttttattgtggtagaaagagcttggagctagtagttcagcaaagtgaatataaaccctgaattggcacggagtgatggggcacttactctattatttaaattcattgcaatcattacagatgccctccagagctatcaccaaagcctcccttttctctattcaaaagaacatttagaacacacacgcatgcacacacacacacacacacacacacacacacatacacgatccctctgtcctcttttatgtcatcactaactcagttcaaagagcacttcctcagaagcattcactcactcactccccagattttgtcaaggttcccttttatcaactcccatttgaaatctttactttccctacatgcactttaaaagagatggtatttcaataattatcctttcaatgtccatttcatgtcctgcactacaatagaaatgtcttgccatacactctgcatctagcacagagccctgcgcagaggagatgctccatatttattgacttcaacatcaatagccaaattgaggcactgagtggaagtaaaccaaattcaattaaataagatgggtcaggaaagacccatacttgggaataaatctaataaaagtgtacaagatcttaacactgacagttacaaaacattgctgcaataaattcaagaattttgaaataaacagagctattccatgctcatggattggatttcttaatatctttaataagtgattctccttaaatgaggtatagatttggtgcaatcaaaatcaaagtctgtaggcaggcatagtggcacgtgcctgtaatcccagctacttgggaggctgagacaggagaatcgcttgaacccgggaggcggaagttgcagtgagccaagatagcaccactgtactccagcctgggtgacagaacgagactccacctgaaaaaaaaaaaaaaattccaacagcttttttcttcctggaagtttacatgctgattcttgttacaggacctagaaaagccaaaatatttattcttaattttaatatttgtgggtacatagtaggtgtatatatttatggggtacatgagatgttttaatacaagcatgcaatgcataataatcatgtaagtggggtttccatctcctcaagcatttatcctttgtgttacaaataatccaattacactcttggttatttaaaaatgtagaattaaattattattgactatagtcactctgctatgctatcaaatactagatcttattcatttattatatttttgtacccattaaccatccctcctaccctcaatacactttcccattaaccacgccccctacccataccctttccagcctccagtaaccatccttctaatctctatctccatgagttcaattgttttgatttttagatcccacaaataagtgagaacaggtgatgtttgtctttctgtgtctggcttatttcacttggtatgaccgccagttctatccatgttgttgcaaatggcaggatctcattcctttttatgactaaatagtactccattttgtgtaagtaccccatagatacttaggttgtttccaaattttggctattatgaacagtgctacaacaaatatggaagtgcaggtatctcttcaatatattaacttcctttcttttgggtatatatccagcagtaggatcatatggtagctctatttttagttttttgaggaatcttcaaaccgttttccacagaggttgcattaatttacattcctaccaacagtgtatgagggttcccttttctccacatccctgccagcacttgttattgcctgtcttaaggatataaaccattttaactggggtgagatgatatctcattgcagttttgattagcatttctctgaagatcaatgatattgaacaccttttcatatgcctgtttgccatttgtatgtcttcttttgatatatgtctattcagatctttcaccgattcttttgatcagattattatatttttttcctatagagttgtttgagctccttaggtattgtggttactaatttttcttttcttttctttttttactaatttttcatcatatgggtttgcaaatatttttcttattctgtgtgttgtctcttcacttcattgattgtttcctttgctgtgcagaagcttttcttttcttttcttttcttttcttttttgagagggagtctcgctctgtcgcccaggctggagtgcagcggcgtgatctcactcactgcaacctctgcgtcctgtgttcaagtgattctcccaagtagctggaaatacaggtgcatggcaccatgcccagctaatttttgtatttttagtagagacggggtttcaacgtgttggccaggctggtctcaatctcttgaccttgtgatctgcctgccttggcctcccaaagtgctaggattacaggcctgagccaccgcgcctggctggcatttatttattgggtgctgctacagatccctctgcagatattaagcaaatgtgctgaaagcctttccaagaaagaatgagtcagattccaatccgggccttagccccaggatattgtccacagaaatgtggagcacaatgattacgcctctttctcacttaggggattttctgtagaatctgtttctctccagttcttgccctatattgatatatttctcagggctgctctctagagggtaaaatgtgatgtgtcagaagatccatggaagcagccaggaaccagttgctaggagtttggaaaaaaatcctgggagcaggcagagggtatgtgggtttgaatgtcaaaacggccatgaagcaaagtaagtgagaaccaaagaatcccatcaaagtagcccctgagagacccttaaggctgaaagtggaacttagctcagcatggccctctcagccaggtgattttttctcttgatttctggtgaagcgtgagcttgtaaagccacagggagccagcacctaccatcttcttgaaagcctgatgccaaagatctttaaacatcttgacaccatatatcaaggaatccagctgccagataaaatacaagacttctagttaagtttgaatttcagatgagcaacaaagaaatatttagtgtaagtatgtcccaagtgttacccaaaacatactaaaatgtttaaattatctgaatgtcaaatttaagtgggcattcttatgtttttatttgctaaactggcaaccataactaggaacacccaactcccagcatccatgaaagctctctctactttcctgcagactcaaagccaaagaagtaccaatacttcttcagggaccagtgtattaagccacttttgcattgctataaggaaatacccaaggctaggtaatttacagagaaaagacgcttatttggctcatgcttcttcaggctatataggaagcatggtgctggcatctggttggcttctggtgaggcctcagtgacctgttactcatggcagaatgtgaagcaggagcaagcatgtcacatggctagagtgggaatgagactgagaggaagtgtcacacatttttaaatgaccagatcttgcaagaacccactattgtgaggacagcaccaagctatgagggatcttccccatgacccaaacacctcctgccaggccccacctccaatactggtgattatatttcaacatgagatttggagaggacattcaacctatatcaaccatttaaatttaaagttgaggaatgaaaacatttaagagcaagtaagcatgaattatgttcacccaatcgtactcctaaaaccatctcagctcctctccttcagccaagggcatgtcctcatgtccaatctggttctcactggagagatttgggagtgggaactctgcaatcttgctgtggtcaataaaagaacctcccagaggctcacaggggcttcaagcttcaatcgtagtccccatttcagatcctctgacactctcccatccactctccttgtgcctgcttcaaagccacagcaaacagaagccaaacctttagtaaggatgatcccaatctcaattccaaccccagccccagcatatccacctttgcctatacctaacactactatctggacatccgctttcagcccaggccctcgctgttttcctcattgcctctgtggcacctcagtcccagtttgccctccacccatccaggaagctcactcccttccctggattctcatcttggctcttttatgagcttccttgcatgccttcaccttcctgggttccagagagcccaagaccagctcccaggaatagtgcccctaccccgatgagcctgatcccagaagaattagccccaaagtaatgctgagctttagccagaacaaaagctagcctagaaaattccccaggcaggaaacagatgactgcacataagtctcattgccgaccccattcgtttcccacaggggcttgtctgcatcctcatccacgtgtgctcaggctcagagtgagtttcaggtgaggaaagagtgatgaacaagcagaatggaggaggaatttgtggggttgcaggatggggctctgacagggccccaggttggcagccaggtttgtttctctctgggacccacatctgatctatccctcaggaaagagtcagtcagccagcccccaggtgtggaaaccagatctgtgacatcatggagaactgctccatggataagcccatgagtaagccctagtgccatttacccaggtgtggattcacctgctcctatgctccacttccagcaatgatgacaaacattctttggtcccttggatcaaaagactttgagtcaaaaggtttcaggtgtgaactctgactgcaccttcccccataatcaaagaaggatccaggtaggaatccctgccatgctccaggctgaagcggggagagagcagcagaaaaggaatttcaataactgggtcctcccaagaggggaccctgctctgttctccatctctccaccttttgtcacagatgctcttcaaccaattccgccaccatgtgtcaccatgtgtctctgaacacaaatcttaaacaatctctttatctctccagatgaagaaagacccaccagggcagacagagctgatgtttccttgcagtggcttagacagtaatctgaggtcctgggatacagggtacattaagatattaaagacctcgagctctgagtgtcgaatctcatcatgatggaatccaacataaaacaagactgaatgcaaacatgatgcttaattgtgtgcggaattgaaaaaaatagttctcaatttttttgcttgcaaattgtgggatacgtttaccagatttgaacttttcccttatttgtcatcccgctttgttgattctgtaaccaggggcttgggattcattttggggatcccaaagcccttgtttgttgaagggtttcaaagtctggtaggagggtggtgcacacacagatagaattgttcatctgtgggcggcctctgactccctccctgggtaggcctccaggcccaatccttccttctgaggaaccgccgggaaagactttgatcaaaacaattaaatgcattgggagctcagtctgaggcaattatgtggtttcatagaggaagaggtagagatgactcaggcatttctggccccatgtcagcctcagggcaatcacattcgggattttgcaaaagacacattcactctgagcactggagacctacatctctttgtccagttgacttaagttctcaccaagtgaatatcttcatgctaaagacagtttcatttgtgattagggacaggagagcatgtttcccctcggtcctctgattctgactggaggggcagtgctgagttctggatcggggctgctggcagtacgtgggaaagctgtcctatcagtactgtatagaacaggtggtcagagaaaatgcctccctggaaaaccttttcacatggttgaatgtccccagacatgagagggagtggaggactttgttctagagcccacctcagaggccaggcactgccaatgccatgagcaaaatcttccacctctttcccccaattttctctccatctggattctgtgttgctgaggtcatttgctctgtctcttcctaccctctgtattcttctctctcatctgactgacttttctcactcaattttcaaatatcacctaaaataataatacagataagaaacaaatgtattctaatgaaaatgttcagtctgagaagtaaagattacatggtgagcattgataatttttatcatgcttcctaccctccccaaaggtaactgcatttaagatgtagtgtttgtatttttccataaattctgtatagttgaatacatataagtctacatatatgccacacttttcccttcttataaataagatatcatacatcccccccttgaagccctaaaagcccacagatcacagataattctcatggctgcctagatttctattttatggataaattgtaatttatttcatttgtcttctttttgaaaattatgtaggttgtttgcaatatttcagccttaccctaaaaattctgcaacaaatattcttgtatgtacatatttgggcactttaattagagtgtttagtcaacagcaatagatgtgaaaattctgaagcaaattgtgtaagatgctctgagccatatgcatagggaaaaatctaaacaatagattagactaaagcaataaacatgaatgaacaggttcagggtttcagttttaagaattgaaacatattttgaatggcagccagtaaaatgcactgactccaaacacttcaaacaagacattcctgttatcaggaaggttaggagggtaacgcttgttttgttcactaagctgggtggactcatgattactgaagcaatactcatttctgctttagtctcctatgtttgcatcccatgaagctcaaatacgaattgaagcaaatctctaagatttttttttttttgccttatctcctaaaacttgaggaatgcatgtgttcttagtgattcacatccacgggacaaaaactcaaggagaaataagagctgacgtcatgcaagtcttggctgcttttgttactatacattttctctgagagtccaacagacttcgggctggaacttggcactggagactcatgttcggaatcataggggaacatctggctgttaatcacttgcacaatttagaacatttcctttacattggctttaaattctagcccttatttcattttgtagtcttattttctttcttctgcatgctcacaataccaagcattaaatgtattttaataactaaaaaaaaaaaggaattttatttctggtggtgttactaatggttgtgtgattgtgcagagtccagaaagctgctgacttaactacccatcacccagctcaaaacgcccaatcccctcttaggtgaaaagtgatgaccatacagatatttaaaggagaagcaccctcacttacaacatcagagggtcaaatctacaggctcatcagctgtcctacattttgtcaaaataaagctcctctcaaacatggaggcacatcggcagttcatggagccagaagtacctacttcaccctctctcttacatgggtgggcctgaagtactccttatcagggcatctggactctattttgggtgtgtgcaaagtgttttgaagggtttttcttggtcgatgttttgtatttgggggaaaaattaatcatcctcaaattgaatcgcctaatcaccaggtgaccccaggtgatggcatggcaccatactctccagaggtctgcgatatttgcccagtggagtacagctcccaacaagcctgcggtcctccattcatgatgctctctagaatcccaagatggcgtttgtttgcctgcatgggattcaccttccatgactctcaggaatcaggaactcaaaagacatgatcctgtttttttttttttctttttttctctgcctatgtgtatcagctcagccaacctcctcaatgtgctttccctcacgccagcggcacaccagcaagtcagcaaagttcaggggctcagtatgcactgaatgaggacacaagtcttatttgcctctcccttgactatgttgggggtaaggagaagacacagcctctctgcaagcacaatactcttccctgaaaggccaccctctttctggtttccagtactcctcttatatcactagtatcactagttggttctgcttctctcccatccagggatctggagaagtttcatatcaaataaacataaacacacgaataaatgggtgtggtcctggaaccaaataaataatcttcattgaagtggggatggggaggtgtaagacaaagacagtagtgacttgcattagacaggaggtagtgtgaaaccacgactcctgaaactgtaagcctggtctgctgatcatggacaccagcagaatgaattcataagttcaagtggtggaataatatttttacagaggtaaaagaaaataacagccaacaaagacctttctaaaatagccttcaaaaatggtaaggaggttgggcacggtggctcacgcccgtaatcccaacactttgagaggccaagacaggtggatcacatgagtccaggagtttgagaccagcaactcctgggcaacatggtgaaactccatctctacaaaataaaaaattagccaggcatggtggcacatgcctgtagtcccagctactcgggagtctgaggtgggaggatggcttgaacttggaaggcagaggttgcagtgagctgagatgacaccactgcattctagcctgggctacagagtgagaccctgtctcaaaacagaaaaaaatgaagctgaggattctccaacttacagccattaagggcagtgacttcaacgagactacttttcctgctattgacaacagtaaaactggatgaaccaaatgaggccactgttttcaggtggtgaacgaagacaggataaaatatcaatctctgaaagtaaagtcacagagtgaacacctggatatttggactctgcctggggacagtttcccaacggaagtgcaagtagcaaggatctgagtatagcacagcagttccgcagaactaaggttctggatggcttgatggaactggaatcccttaggtgtggcatcagtgaagaagtgcgagccccccaaatccacgtggggtccaccaaagttcctggatgaagactggtctgcacatgcacattctagaccacccaaagcttagcagagaggtaagtcttaagaagtatttgtctcatttatacccatgggattttaatcaatggaggtaatgacagggagatgccaatgccattgaaatatgtttaatgtcactcacagtttcggtagaaattagaggcacagaatgtgaagcaggggcatgtggggaagccccaggtgtgatcaggagacagaggcaggagtgagcaaaaacctaggccagagcccttatgatgtgttctgtgggaaaggcagaacagggcaggagatgcagctcacaactggtcagtttgaataatattggcagggtgtgaaatatagtggcagcctctagttgtctggtacctggccctgggttgacttagggcagagaaaatgttggcttggtgtgtaagagagataaaggagatggttcagagcgggggctctggatctcgggggagatgcagatacctttggccatgagttaaaccccgtagttaatggataccaaatagagaaatacagactcaagaaaacacaaagcactatcccagttgggagagcacaaaggagacattatcaaaagtaatgtgggattctggattggatcctggagcaggaagtggacaggaggggactaccaacaaaactaaaataaagcctgtagattcaacattcatttcctactttcaataattgtattaggatcatttaagatgttaacattagacgaagttgggtgaaagatcaaaactctgtactggctttacaacattcttgtaaatctaaaattatttcaaaatggcaggttaaaaagtattttaaatgatacctacaaaatactatcatgatagtgatagtgaacactcactaaagatatgatcaggatgccctaataggcctccttattcttgtaattgcaattagagttccttctttccttaatattatgtaactggagctcccttgagctatttctagcctggggtataatgtctgactcatacacatgtagtttcataggaagccttggggccctagcagaataacactatcacccacaagataaccagccaggtgctgcaccaggtctaggccctctgtgtgatggatgcggtcccgtaaccaaagggagacaaagttaccacaccctatgtggcccagaaaaatggccagagactgaactggcacagtctctgctaacacaagagtaacagcactcttccacccagtccatgctgcctggaacttccctgacagagaatcattctgggatcattctcgagaacttggcaaatatctcaacactctgacatcacattctcttctacagtcaggatcctcaatcctggattatagactcacaatctcaacttcttttctggacactggaagtctttaaagatagaatggtcagaatgactgaaagtatttttttgtaatgagaagccaaattattgtaacacataaaatgattttgctgaaaaacttgattgatggcacataattacaaggcatattctttcctttcttagtagcttaaaaaatcaacatttctttccttctctaatacattacttgggaatgtctcagtggggaaggctcatttctccttcgcacagtgttagctacgatggcctgactgagcctggaggatttgcttccagaatggctcatttatgtgcttgagaaactggtgctgggtgtcatttgggagctcagttcagggaattggctaggggggtcttagttcctcttcatattagtgcctccacagggctacttgggcttcctcccaagaaatctgtattagtcagggttgtctagagggacagaacgagcaggagatatatatatacatatatatatatacacacacacatatatatatcttattattgtgggaccttgtgatcgtgtgagttaacactacttaataaactcccatatatgtatatgtatacttattataattaatgtatgtatatctacatatgtatatatgtgtatgtatatatacacatatgggagtttattaaatagtattaactcacaggatcacaaggtcccacaataggctgtttgcaagctgaggagcaaggaagccagtccgagtcccaaagctgaagaacttggagtctgatatttgagaacttggagtccgatgtttgagggcaggaagcatccagcatgagggaaagatgtaggctgggaggctgagacagtctagtcttttcacatttttctgtctgctttctattctagccaagctggcagctgattagatggtgcccacccagattaacatcgggtctgcctttcccaacccactgacccaaatgttaatcttctttggcaataccttcacaggcacacctagcatcaatactttgcatccttcaatccaatcgagttgacagtcagtattaaccattacagaagccaagctccgcatgcaagtattccaagaagctgatgaaaatcatgtccctgacatggaaatcaagacactttcaccacattctactggtcaaggaagtcacaaggtaagcccagattgaagaggaagggattcaattccacctttcaatgggaagaacagaaagaatttgtggctatcttaaacctaccacttagagttttcaatagtttaaagaataatttatttttagaacagcattagatttacagaaaaattaagaagctagtataaaaagcttccaaataccttgaaaccagcttcccctatttttagcttcttacattagtattttattataattaatgaaaggatatttataccccgttagtaactaaagtccatagtttatctaggttttcttcattttcaccagatgttctctttctgttccagaatcctattcaggacacattgcatttagttgtcctgtctctttagcctcctcttgactgtgacagtttctcagatttttccttgtttttgatgaccttcacagttatgagcagtactggtaaggaacttgcttattttctggcacaagatgcttcagatccttaccagggtctgaagggcactggtaaggttgtagaatatccctactggaatttgtgtgatttttccctctaatgattagactgacattattggttttggggagcaagataacagaggtaaagtaccatttctatcacatcctatcaaggagatactgtcaacatgatttatcattgatgattatgacaccgattacctggctgatgtggtatttttctccagcgtaaagttactctttttctcccctttccacattgaactctttggagccaggtcattatttgcagcctgcattttaaaaagtgaggagttgggctttccttccttgatggtgctgtatttatatatattacttcgaattcttctgtattagagatttgtctcttctccccacttatttattcaatcatttatttataccagtaggaactcatgagtatttattttaaactttgggtttatcttagtccattcctgctgctataacaaaataccttagactgggtaatttataaacaacaaaaatttatctctcacagtttccggaagtttgaaagtccaaactttcaaacacctgcagagtcagtgtttggtgagggctgctctctgcttcaaagatgacatctttcactgtatcttcacatggcagaaaggggaaacaagaacagacttcctccagcacttttatatgggcactaatcccactcatgagggaggagccttcgtgacctaatcatctcctataaacctacctcttaacactgttgcattgaggattaagtttcaacgtgaatcttggagggacacaaaaattcagaccacagtagggtcataacccaataccaccgaattcatttcttgctcaaattgttccagctttggccactgggagctcttctgttggcccttgtgcccctttgacatattgtgatcaatgtggggttatatcattattgtaattgttattttcagcacttccttattttctggcacaagatgttccagattcatcgtgtatattttctgttccagatctagaatgtgccatttctccaaggactgtgcagtccttttttacacttctttccttttaaatttattccgtggttctagttcttccttgatcctaaaagtttaggtcaaattgtatacattttcccggttagttttatttagtaaatataaatatattatttagttttattataaatacattatttataataaatataaatacattatttataataaatataaataataaatatcctggtgttgtcaacttaaaatgcccagaaatatgtaaaagtgaaaacaaaactcttgatttaaagatacgtttcactctatctttcctggctgcccggcacttctacctatgcgtcttccctgttcactgacctagcttctgttcttttggtgctggaagcacaaagagggtgtgagattcctaacgttattgtgattatccatgggcttttcaaatatgtaaagcggattacctcaaaggccccctttggcttctttagagacacaaatgctgaggatctctcacctgagcatccctcgatgagggctgttgcgtcttgatttcatctgggtagttacaggcatcatccaccacgaagtttccaacccagagtcaggatgcagctgagcttgacgggcgtggtgcagacgtcggtgcagcgaaagctgaggagccgtgggcgttcacccgggtgccggtgtttctaaatcgcgggctgcgacctgcatactcaggtgccagctgggagcagaggcggatttgcgaggccaaaacctgggtgtgacttggaatctcagtcgcgctatgggggtgcacgctggctcaaatccccgtggaagatgcacctgtgacctgcccaggctgcaaaaccaggtgcgctgccatgggcacgactcactgggctccattttcaccacagggaacttggaccgcctgacattgaaaaagactgaggtagctcgggggcagccaaaagaaaccagaggcggggatcctagtatcattcaggaagtggacccagccgcaaactcaggagcgttccaagtgtccagagcgtctggtagtcgcaatagccagtgatcagtgacacccccaagaaagtgatagcgacagaaacatggcgactacttacactgccgcccccgtgcgcccctgcgcgagctctgctggaggcgcccgcgggagcgcctgcgggagcgctccactgcggaatccgccgctctcttctctgagcagtctcctactgccatctagggaggaatacggggataccggctggagtaccctctctatcttcttgcctgcaggggtcgcaggatagatgtttcgagagcctataaaagtcatacagtgctatggtgggtgcacgctaaacgtgcctttgacactgtgattaaatcacataacccatataaaaagtaattggaaaagacaacccccagaatggagagaatgtttaaaaatcgtatttctgataagagattaatatccagaatatataaataactcctgaactcaacaacgggaacaaataactcatttaagagacaagagaaggatttgaatagacatttctctaaataaaatacataaatggccaataattacatgaaaagatgcgcaacatcattgatcattagggaaatgcaaatcaaaataacatggagatagtacttcactccaactagcatggctattaacaaaaaaacagaaattaacaggtgtgggtaaagatgcggagaaattaacaggtgttgtgcattgctggtggtaatgtaaaatggttcagctgctgtggaaaacaatgggagtttctcaaaaaggtaaatatagaattaattaatatacgacccagcaatcccaatagtaggtatgtactccacacaattgaaatagggacgcaaaaagatatttgacatcaatgttcatatcagcattatttatagtagccgaaagatggaaataacccaagggtccatcgacagatgaatggataaacaaaatgaggtattttgatacaatggagctggctactaaccacctgctcctgtattacctaaaggccttcactccctaacccattggtcttttttgtccattattttttgtaggggttataacagcattcaagtgtggagtcaaggctcactttaaaatgcatcaaacatagctatgtatcaattcaccacagtccgtcaaaaggcctgtgacgcactctctctgggggtatttgagccgatatcccagtagtcaacactagatggcagtaggagactgctcagaaaatggagagcggcgcccaccttgcagtgcgcaggcgtcgtcagtagacatcgcgcaggcgtcgtcagtagacatcgcgcaggcgtcgtcagtagacatcgcgcaggcgtcgtcagtagacatcgcgcaggcgtcgtcagtagacatcgcgcaggcgtcgtcagtagacatcgcgcaggcgtcgtcagtagacatcgcgcaggcgtcgtcagtagacatcgcgcaggcgtcgtcagtagacatcgcgcaggcgtcgtcagtagacatcgcgcaggcgtcgtcagtagacatcgcgcaggcgtcgtcagtagacatcgcgcaggcgtcgtcagtagacatcgcgcaggcgtcgtcagtagacatcgcgcaggcgatgggtgaggcggctttggccgccatgttttcgtcgcagtaactgccttggtgtcagtagtcattgccagtttcgggcgttctggacaattgggatgctgcagagttcatggctggggctgctcgttgggtgggacaagaatcctctgcaatggtttgttttggctgcccaggaggtgcgtcaagtcgctgccgctcccctcgtgggcgtcaggcctcaagagttccccgcctagaaaatggagctcagcgagtcgtgcgtaccatggtgcacctggttttgcagcctaagcgggtcactttagtgcatcctcctcgcggattggagcctgtttgcacccctatagcccgaatgagacccaagtcacacgggctcagaagttctttgcccctggccatgatcccccagccagccacccgagtttccaggcctcaggcgctttggaaacgcctgtacgtcgcctgtacctgaatggcaggtactcatctgctttagctacatcatagtctgcaccacttctgccagctcgattgcagcctggatttgagtcagaaacttttcatggtggatgagggttgtaaatatccaaagcgactccagatgaaattgccctcatcaaaggaagctcagatgacagatttctgcatagaagccaaaaaagccttccctcaaggaaagagtcagtttcaagtatttgcaaactcagaacagtgtcaattttagatcactacaatgctgcccatcaaggaagaaccctattgctccctggcgtctctccttgagccctaaacacagtagattcagaaactaagtcagcaaatggaggaagattcttaaccgtgataagttggaaaacgtgcgtcagagggccacatcccttcctcgagttcaggctaccacctgactgcaggtcagagctggaagagacagtgaaaatgtaagtttaaataaagattgtcgttttcacttttacatacttaaagccattttaaatgagtcacgggcagatatttattaaataaaatgaccaaaaaattaatgggatttgacctaacttttatcctggggcaggggaagaactagcactgcagaatacatttaagctgcgagccgtggctcctgcctgtaattccagcactttgggaggccaagatgggagaatcacttgaggccaggagtttgagaccattctcatcaacatagcgagtcaacttagggagatcccatctctatttattttttaaaataaaaaaaagaataaatttaaaaggaaagaggtgtgaaaacgacagctacttagtaattaaattctgtgagtcatggcttgttcatgggaatgattctatttgaatgttataataattttgtttctaatttcagaaagtattttggtccttctgaccaagtctttgtatctgtgtaaatcatgagttaaagaaataactttccaaaaagaggttgagatcttctgattcaggacttaagcattgtgagtgtcaagggggtgtggtgtcagtgttgagatgtgtggccctgtccctgttggtggtcttggtttcagacttctgtcaggaaagagtcagacagtgttgactaggaaaaggagttctgtggtgtctgtggtttggtctgtggtaattttgctgagccagaaagggaattccagccttgatgtccagggctgactctccgggcaggctgcccattggtgagtgggagcagtgcctgctgtgctttcaggactgtgtccatcacttcctgtccaggtggacactgtagcgcaggcttcccattgatggacgggaacctgatctccctgtgcttttactgccatgctcatcacgcactggggatcatcagcccaccttttaaacccagcccacaattggccagttatcttgtgggtgatagtgcaactgtctgtgtcgccaggcttcccacacaactatctgcatctggtttggactggctaaaccaggccacaccaaaggtcaggggagccttagatacataacgcttatttcaggtgtgagggagcatgtgaaggcaccctgattgcatctttaggaagtgttcattatcgtgattgcgtttttatatgtaacatttaaaatattgtctaacttattactttaaaataattttagacttacaaagaagttgcaaaaacagtatggtgaatttgtctttttcactcagcttcctctaatgttgcatagccttaataaaattattgaaaccagaaaactaatactgacataatactattaactgatctgcagaccttatttgagtttcatcagttgtcccactcgtgtccgctttctggtctaggatgcaatccagaattcagtgttgcaattcgttattgtgtttccttactctcctctattctaggatagttcttccttaagccttacctgtctgataagccttgtcttatcagacagatagtcttgtctgtgtatatgcagcctagccctcagccaggaatttggggaagactccacaaggacatgtggtgcttacctctgcacagttcttctttgataccatacctcagagactccaggctcaccagctgccctgaatgccctcagtgctgcagaactgctgtcctgtgctcagatcccagctatctgcattgcacttgggaaattgttctttgacaacttgtttatctaagggctcaccctgtaaatgtccatcccttgtggaattgcagtcttgtgctacctgttgtctggtacctaaacacagtggcttcatatactttattctgtgtgcagttttatagttgttaatgtcaagagagctagtctagtttcagttaacaccatcatggctagaaatgggagaatcctcactttcattttgaaggctattttagcagagtatacacttctacattggctgtttcattctttcactctttaatgaggaaattccttgttagtactattcatgtccttggttagcaggccagtcatgctttcaggagtctagttttcacaccatcttctcttcagttcaaattactgttactttccttttctgtttccccatacctgggtccatgaagatgtatttactattactactatcattattaagacagttaaactctcctgggttcctaggtgggagagaagtttaactgtctacaagtataaggggagaactggaaggcaaaagagggtagccttttggggcaaggtgtttctctttagagagactgtaattctcttgatccccacagggtggaggtaaacttggctggtttcctagttcagtgcatactaaacctctgaacttgcttgtgtgccactgaagagagggaagacacattgaggagaaatgcggagctgatacagacaggcatattgtacacaaccaagataagtgggatcaagccgccctgtaagagagagggtagaagcagggacttctggctccctgaactgttaactgtgtctccatttttttttttttttgaagacactccactctgtcacgcagctggagcgcagtggtgcagtcatggctcactgcagccttgatcttctgggctgaagtcgtgtcttcatttttgataggaacgttattttgacaaaatgtgggacagctgatgagcctatagatgtaactctctgatgtagtcagttagtcatatgggtagctctccttgacaaactgcataggaatctcttttgtcctcttagtaggtggtaattttcccctgggtgtgggatggctaagaaggacttgcacaattacataaccatgggtgacatctccagaaagaaaacctccgataaacatgacattttctcttttggggcatttggattcagtgcattttattggcaactgtcctatgtgtttaaattcctagaactgaaaccctggacgcacggtagctcataattcttgttacataagataatttgtttattgttttagttttcaattagtttttccttaacatataactgagtgcatcataaacaatttgctttagaatttctacttccagggctgttactgactggatgcagtgcacaaagacatacgtataagactatttttttgtgatattttagagcaatggtgaaaagttgggaacaacttaaatcgttttcaacagaagactaatgaaataaattactgaaacttattcacaaaatggaaatctaggcagctgtaagaaatggatatgtgctcttagggatttaaaggggtgtgtataacattatcccataaagactaaagtgtggtacgtgtgtacatttatattaatatgtatgcaaatgtgtagaatatagaaaaattcagacactatgttgtaaacacagttactttggggaggagaggaggtgcgatgagagaataccaaccatggctgtataatctctatttctgaacatacacaacatttttcaagaaaatatattactttattatttgaattattattttcagccatatgtatagactgaaaggagagagagacaaggagacagaaagagacagtgacagagaggacagaagagtcacaaagagtgggaggagagaaagggaaggaccttagccacagaaagttgagaggagagtaagttggaagaggtagtgattagagattttgcgcattgacagtggttgacttggcttctggggtaggccctggaacaaagtcctctgatcctcggttgtttgggaatagtcaattatgtaagggtattctggtgctaccagttttgtgcaatggtgggcatttactgctataaacttccctcttagacctgcttttgctttttcctacagattttggtatgttgtgtttccattttgtttgtctcaagaaatttttaaatttcccttttaatttcttcactgacccaatgattggtcaggaacatgttgtttaattcccatgtctttgtactgtttctgaagttcctcctgttacggatttctagtattataccattgagttagaaaagatacttgatatgatttcagtcttcttaaatttgttaagacttgttttgtggcatacatatgatatatcctggagaatgctcatgtgcagttgagaagaatgtgtattctgcagctgttggatgaactgttttgtataaatctattaagttcatttggtctagagtatagtttgaatctgatgtttctttattgattttgttttgtctggttgatctgtccattgctgaaagtggggtgttgaagtcccctactattactgcattgctctctctctttactattactgcatctgtctctctcttcagatatattaatatgttaggccattcctacattgccataaagaaatagctgagactggataatttatataaaaaaagagctttcattgactcacaattatgcaagctgtacaggaagcatggtgccaacatctgcttctgaggaggcctcaggaagcttacaatcatggcagaaggcacagtgggagcagaagctagagagagagtgtgtgtgggaggtgtcacacacttttaaaaaaccagatcttacaagaacttatcaccaagggatggcactaagccattcatgagggatatgtccccatgatacaagcacttcccactggtgccccctccaacactgggtattacatttcaacatgagatttggtgggaatacaaagatccagaccatatcattccacccctgtctccacatctcgtgtccttttcacgttgcaaaatacaaccatgccttcccaacagtcctgaaaagtctttactcattccggcatcaactcagtcaaaagtctcaagtctcatctggacatgaattccttccacctatgagcccgtaaaatcaaaacaagttatttactgccaacataccatgggagtacagctattgggtcgctctccaaaagggagaagttgaccaaaagaaaggggctacaggccccaatgcaagtttgaaacccagcagggcagtcattaaaacttaaagctcctgcagtgagccgagattgcgccactgcactccagcctgggcaacagagtgagactccagctcaaaaaaaaaggaaaacaaaaaacaccaaaagaaaacaaaacaaaacaaaaaaacttaaagctccaaaatagtctctcttgactccagactgtagtgttgggtgcatgtgtatttcatatagttaagtcttcttgttgaatctgaccctctatcattatgtaatgcccttctttttcctttttgatcattattggtttaaagtctgttttgtctagaataagaatagcaacccctgctcttttttgttctctgtttgcttgatagatctttctccatccctttactttgagccatttaatttgagatgggtctcttgaatacagtatacagttgggtcttgcttctttatctaacatgctcctctgtcttttaagtggggcatttagcctgtttacattcaagtttaatattgatatgtgagggtttgatcctgtcatcatgttgttagctggttgttatgtagacctgattgtatagttgctttatagtgacagtgggccatatacttaagtgtgtttttgtggtggctggtaatggcgttttgtttccatgtttaacactcccttaaggaactcttgtaaggcaggtctggcagtaatgaagtcccttagcatttgcttgtatgaaaaggattttcttttctcctttgcatttttgttctttgcaacaacaaagaaaccatacaggaacattggttgccttctgggacaccaacaattcaaatattttattgctttaatagtgcttcatatttcatgtaggctccactcattcttttaaattattttttctttgtttttgtctgactaggttacttcaaaagacccatctttaagttctgggattctttcttctgcttgatatggtctatttttgaagcctttgagtgtattttctatttcattcaatggattcttcagttctagaatttatctttggttctctttaatgatacctatctctttggtgataaatttctcattcatagcccgaattgtttttctaatattgttggtttttttgtattgtatgtcattgagaacaactcacttctttaataacaacatattgaattttttctgggatttcataaattccttttttttcttgttttttggagatggagtctcgctctgtctcccaggttggagtgcagtggtattccactgtccactccaatctccttctcctgtgttcaagaaattcttgtatgtcagcctcctgagtacctggaattacaggtgcgcaccaccatgcctggctaatttttgtatttttagtagagacagggttccaccatgttggccaggctcatctcaagctcctgacctcaagtgatctgcctacttcggcctcccaaagtgctgggattacaggcattcgccaccacacctgacctcataaattcctttttgattgggatctgttgctagtgaattattgtgttcctttggatatttccttactttttcatgtttcttgtgttcttacgttgatatctgcacatctggtgtaagagtggcttcttccaattttttgaatttgctctcatggggaggatttttttcctgaagttgtatctatgatgttggttgggtagggaattttggctttgattgtgggtacatgcagtagtgtagtctctgtgtgatttattttggctataaacagcatcagtggtgtctttcattttctcagtggcttagggtgcaattgttagtgaaggctattatgaagttttgctggagactgggatgccaggtaggccaggttttgggccacggtggcagtagtgggctgaatgtgcctgtctttgggccccagggtggcatacactggcatcagtgttagcaggtccaggcaggccaatcgttggtcctccaggtcgcttgatcaggtattgagaatagcagtggtatttggatgggtggacaggttcttgggccctgggcataagtagcatgggcaatggcagtagcagtgatgggacaatcctctgagacccaagcagtctgtgctgatgttggtggtagctggggtgcactaggcaggccattcctcaggctcacaggtggcacctgcaggtgggtgctggctgtggtggtagtggcaggctggttgggcctaacctcagatgttaagagaagtgttcaggtgctatcagtagtagaccaggttgcgtgatctgcaggcccctttgatgggtgctcaggtactggggaggtggagctgtgccaggcagacctgttctcaggcccccagatgatgtatgtaggcactggctctggtaatcagggatagggtgatcctcaggctgccagtggaatgctcagttgagggcagcaggagctgcactgcggccatgctactgggaacagtgagactgcttttagtgggagcagcgttaggcaggtggctggggcatgtgtgctttgcctgtgcctcaaccctgcagtagcctgcaagtggcagcaggcagtggaatttgtccttggggcatgagaaaatgcatgactgcccctctactgatgggaaagggttgctgtcatcagtttccactttggtcctggcagtgggtggggaatgtcagttgggctccagggatatcgggatgtgagggctgtttggcccagggaaggatgcagtctagtggaggtggagctcatacaatggtgccttgatgcagctgattaggacttaggagtttgtgggactccatctcattggagcaatgccatagtgcagtctccagacagctccctatgttagtctcaggacctgtgagggctgaggggctctcctgtggctaggactgtaggaatctgtggtagaaatgtggaccactgggggtctctcaccattcgcccagttgattctggctcggcaggccacttcacttttctctccttccttgcttttggtgcctcccattacttctctgttgaattctaatgtcctctttcagatgatctatttgaagtgtcattatctatggactattttgtttcctctccataaaagaggcaagtacccagtgcatctagtcagctgtgttaaagtctttcctttattctgtgtcttttgattggataatttgatccatttacattgtttattatttaagataagggctttttttctgtactaactaatgaacccatatgtttaattgtcagactttattcagcaccactgagtctcaatatcaaaacaactaaaatttaagacacaaccttcaattgtaacatatatatttacacttcgtgttcattatattgttgaatggtgccatcattcatctacttggctaactgctaaccagaaattaaaactcttccattcagcttcttgtcattgatttacaaagatttattgaacactttctatatattaagagcttaattgtgcactagaaatataaaaataacaagataatatctgttctggagttgaggcatttgggtgacaataaatgaagttacaaaacaatgtgagaagaggcgatgagaatacaaagataaagacatatctagagctcttctggagtgatcatgtcatttgagacctcacagatgaagtaatatcatagcctactgttgtatgttgattggggtttgagaagattgaaaaacaaaacaaaacaaggatgtcccagacagaggaaataatcagcaaagctataaaggattgaaataggaaaaggaagtcattctatgaacatgactgggttaaaggcgctaatgtagactctggtagatcttaaaagttatttataggtaaggactttctactgctattttgtttattgttttatagatcctttgtttctttcttcctgtcttactgttcctttgtggttaagtgattctctctagcagtatattttgattccttactttttatttttgtgtttttatctactataggtttttggtttgtagttaccaaaaaaaactttatagttacaagaaaaccttatagttatcatatgttattttaagctgataacaactttgataacaaaaaagcccacctctacacttttactgctctgcaccttgtattttgaattttgatgtaatcatttacatctttttatgtcgcatatctcttaacaaattattgtgattatttttaatagtttttaaaccttcatgtgaaatacatgtgatttatacaccactgttacagtataattctaaatttgactgtatacttacttttaccagtgaattttgtactttcagatgtttttgtgttactcattagcatttttttctttcagcttgaaaaactccctttagcattttttgtaagatggctctggtggaggtaaactcccccagcacttgtttgtctgagcaagtcttatctctccttcatttctgaagaagatccttttagggtatagtattcttggtggtaggtttttttttttcccttctgcactttgaactctctcaggtctgtaaagtttccgagaagtctgctggtgagcatattgaaactcccttatatgttatttgcttcttttttcttgttgctttcaggatcctatctttgtctttgatttttggcagtttacttataatatggcttggggtaatcttatttggattgaatctggctagagtcctttgaccttcttgtacctggatatttacatctttctccaggtttggaaaactttctgctattatttgtttaaataagctttctacctcttggtctccctctttaattccagtgacccaaacatttgctcttctgatgctgtctcataaatcccataagctttcttcatttctttttattatttttttcttttttcccctctgatggtacattttcaaataacttgtcttcaagttcacagattcttttttctacttgattagttctgctgtttagactctgtattgcatgtaaaattttgttcattgtatttttcagctctgggatttctgtttgagttttttaaaattatttcagtctttgctaaatttcttattctagccacttactgttttcctcatttctttgaattgtttctctgtattttctttaagtttgctgagcttcctttaaaaagttattttgaattgtttagtaaggagttcatatttatccatctctttattgttagtcactggtgctttattttgtctccccgctaatgtcatatttctctgattgttcttgatcttgtggccacacgtcaacatctgcatattttaagaagtaggtacttatttccagtctttgtaaactggctttgtctgggaacgcccttcaacaataagcctgtctagatagcctggacagactggtgtgatctctgtgccactgtggccattacaactctagagggtgacctatgctggtacgtgatgacaagcacgttgcccggctggaatctcatggcttctgaggctggcacagagctggcatatgcctgaagcctgtggctgctggtgcctgcctactgccaagatttgtctgtagcccagggcccaggctagcagtgatgcaaactgtggattgagctggccttgcaggggctgtgggttcccatctggttcccgggcagctctggaagcttagtccataggtactgatatgggttgagcggttgcaggggtctgcctaatgcagggttttactgtggaagatccagtattagggtccaaggcaaaattttgtttactttcctctctttccaccaagcagacagtatgtatctctctctgtgctatgctgcctggggttgagtgaagggtaatttgggtgacataaaattgttcttcctactctcttcaatgcatcttttcttattatgctataactaggtactgtgatctctcacctggtttccttagctcttttgaaggtatttttgtgcatgaatcattcaaattgatgtttccgtgtgggcaatgattactagagagtcctaatgcaccatcttgctctgcccttcttcccaaatgcctgtagcctcatagaaaaacatttgtaagaagtagatatctagggaaggattccactgagaagtggtccacatttatgtttttaaacagcacgttttagtgtgaggaggccattaagtggggatatttatgaaagaatataggcaaactgttacttagaatgtcttcagttctgtaaggtgcttggcatgtaaggtgcttggcctacatatttctttcaaattagtacacagtcaaaaactttaatcagtatacaaattattctgttagaagagacacttgtgttttccatgtttgtgtttctccttaggagttgtatttctgttgctgagataacctattgttatatcctagtttatttataatatgttttgtaagaaagactgatgtcattcattgtaggtgtaaaacaggcttaccatgaaatgaaagcctttgttcaacttagagtcctaatgtttctgatttcttactcttgttgctgatatacagaagcagctacaagagctgaaagatgactgtgcacttaatgtctttagttgaaagaattatttagctaaagaaacacagtcattagctatggaatttgagagcctcaacagtttcaatgacaaatacaaaagcatttttaaaaaatgaactcaaacagcatgataaatttttatataaaaataaagtttcaatttattttttaatgcctttctgaattactggttaaactaaaatctataaaaatgcaatgcattaagtgtatataccataatcaaaagtttgaagtgtcacatttcttctataatggggagaaattaatcacatttggtaaacattttttacgttcaaacctggatttcaagataagttaaataattactttcattcactgtcaaggctctttcttgattcacattttgaggttgtttcttttcttaatgcaatactaactttgtgttgttgtttgttagagattggggtcttgttctgtcacctaggctggcctgcagtggtgtggtgatggctcactgcaccctcaaactcctgggctcaagcgattcttctgcctcagtcccctgagtatctgggactacaggcacacagcaccactcctggctaattaaaaaaaattttttttttttggccagccacagtggctcacacctgtaatcccagcacgttgggaggctgagacaggtggatcacttgaggttgggagtttgagaccagtctggtcaacatggtaaaaccctgcctgtaccaaaaaatacaaaaattagctgggcttggtgatgtgcgctggtagtcccagctactcaggaggctaaggtgggagaatcacttgaacctgagcggctgaggctgcagtgagctgagattgcaccactgtactctagtactccagcctgggtgacagagtgagaccctgtctcaaaaaaaaaattttttttttttgtagagatgggatctcactgtgttgcctaggcttgtcttgaactcctggcctcaagttatcctcctgcctcagcctcccaaagtgccaggattacaggtgtgagccatcatgcctgtctgtaatacctaatttttgaccatttattgaaattgttattttatcagataatctaagttataatgtagttgatcttttaaaagggcatactgtctctctaagtagaaatggctccaaaatgtttttgggaagtttgatacttttatatacaaggtagccttaaccagaaaagtgacaatttaaaattgacaaaatgatatttttaagacttcaaaatgataaataatttttaactattaaagttcgcctcaagctaataaacttaagtctgtaaggaaattaaaattaaatattagtttaataacaactaaatatttagtagaagttgcctctctttattggtgatttatttttaattataaaatttttgaagatctttgcttaaagaccttgatatttgaaatagttggacacttgatgaggaaattgcctttatgattatgaaaatctcagctttataaaatgcatctgttaataaagataatttctctaatggtgatcaaaatataaaacttaagacattaatatctcactggaagtgtatatgggtttctgagtaattaaaacattcataagcagaataaaatgcattctcagaaaactagaaatatcagggaccttgcttaactttgtaaaagacatctacaaaaatcctacagctaatgtcatatttaatggtaaagatggaatgttttcctcctaaggtcgggaacaaggcaagggagtctattttcactacttctattcatctttgtcctggaagtcctagctagtgtaatgaggcaaaaacgcatgcagattggaaaataagtgatgaactgtctatttacagacattattgccgatgtagaaaatcccaaggagtctataaagaattcataggacaaataaattaggttagcaagttcacagactaccaagtcaattaatataaaataataaaatgtatttctgtagactataaacaatagtctatggcacaattcaaatttgaattgttcactgtctgtctgtttgaacaattcaaatttgaaattaaaagcaatttaaaattgtatcaaaaattaaatatctaggcctgaatcaaacaaaatatgtgtggatctgtatgcatgaaagttaaaaaactgatgacataaagatctaaataaaaggagagatatactgtagccatggactggaagactcattgttagatgtcagtattcttcaccttgatatgtacattcaaagcaaacttaacagccttggaggatttttttttttttttttttttgccaggggtagggggtcagtattgtaaagctgattctaaaatgtgtaaggaaaggccaaagaactagaatagctaagacaattttgtaaaagaagagcaaagtttagggacctgattctgaggctttttataaaggtgtagtaatcaagacagtatcttattggtgaatggaagaacatatagattgatggaatgtaatggaatatccagaaatagacccacacaaaaatggccaattgagttttactttttatcaaaagtaagaaaacttattttgcagaggggttggttttaaaaaaatatttagattgattttattggataagcaatgtatgaatatatatgtcctattcaaaatgatagaagtctatagagctgaaagtgaaagtctccattacctcaccccaatctgtttttgttgtgctgtaattttgtttttttctttttcttttttttttgtgtgtttttaaattttattgtattttaagttctgggatacatgttcaggacatgcaggtttgtcacacaggtaaacgtgtgccatggtggtttgctgcacctatcaacccatcacctagtattaagccctgcatgcgttagctatttatcctgatgctttcccctcccctgcccccactgacaggccccagtgtgtgttgttcccctctctgtgtccatgtgttctaattgttcagctctcacttacaagtgagaacatgcagtatttggttttctgttcctgtgttagtttgctgaggataatggcttccagcttcatctatgtccctgcaaaggacatgatctcattcctttttatggctacatagtattccatggtgtatatgtgccatgttttctttgtctagtctatcgttgatgggcatttgggctgattccatgtctttgctattgtgagtagtgctgcagtaaacatacatgtgcatgtatctttataatagaatgatttatattcctttgtgtatatacccagtaatgggaatgctgggtcaaatggtatttctggttcttgatccttgaggaattgccactgttttctacaatggttgaactaatttacattcccaccaacagtataaaagcattcctgtttctccacagccttgccagcaactgttgtttcttgactttttaaataatcaccattctgactggcatgagatagtatcttgttgtgattttgatttgcatttctctaatgatcagtgatgttgagcttttttccatatgtttgtgtgtcacataaatgtcttcttttgagaagtgtctgtttatatcctttgcctactttttgatgggttgtttttttttcttgtaaatttgtttaagttccttgtagattctagatactagacctttgtcagatggatagattgcaaaaacattctcccattctgcaggttgtctgttcatgctgatgataatttcttttgctgtgcagaaactctttagtttaattaggtgccatttgtcaattttgctttggttgcaactgcttttggtgttttggtcatgaaatcttttcccatgcttatgtcctgaatggtgttgcctagattttcttctagggtttttatagttttgggtttcacacttaagtctcgaatccaatccatcttgagttaatttttgtgtaagatgtaaggaaggggtccagtttcaattttctgcatatgggtagccagttttcccagcaccatttattaaatagggaatcctttccccattgcttgtctgtgtcaggtttgtcaaagattagatggttgtagatgtgtggacttatttttgagatctctattctgttccattggtctgtgtgtctgttttggtaccagtaccatgctgtagccttgtcatatagtttgaagtcaggtagtgtgatacttctagctttgttctttttgcttaggattgtcttggctatatgggctcttttttggttccatatgaattttaaagcagtttttttctaattctgtgaagaatgtcaatggtagtttgatgggaatatcattgaatctataaattactttgggcagtatggccattttcatgatactgattcttcctatccacaagtgtggaatgtttttctatttgtttgtgtcctctctgatttccttgagcagtggttagtagtactccttgaaggggttcttcacatcccttgttagctgtatttctaggtattttattctctttgtagcaattgtgaatgggagttcatccatgatttgtctctctgcttgtctgttgttggtgtataggaatgcttgtgatttttgcacaatgattttatatcctgagactttgctgaagttgcttgtcagcttaaggagcttttgggctgagacaatggggttttctagttataggatcatgtcatctgcaaacatagacaatttgactttctctcttcctatttgaatactctttatttctttctcttgcctgattgccctggccatagcttccaatactatgttgaacaggagtggtgagagagggtatccttgtcttgtgccagttttcgaagggaatacttccaggtttgccaattcagtatgatattggctgtgggtttatcataaatggctcttattttgagctatgttttatcaatacctagtttactgagagttttttaacatgaagggatatttaattctatgagaggcgtttttctgcatctattgagataattgtgtggtttttgtcattagttctgtttatgtgatgaattacatttactgatttgcatatgttgaaccagccttgcatcccatggatgaagccagcttgattgtggtggataagctttctgatatgctgctggatttggtttgctagtattttgaggatttttgcgttggtattcatcagggatattggcctgaagttttacttttttgttgtatctctgccagattttggtatcaggatgatgctggcctcataaatgagttagagagaagtccctccttttcaattgtttggaatagtttcagaagaaatggtaccagctcctctttgtacctctggtagaattcagctgtgaatccatctggtcctgggctttttttggttggtagactatttattactgcctcgacttcagaacttgttagtggtctatacagagatttgacttcttcctggtttagtgttggaagggtgtatgtgtccagaaatttgtccatttcttctaaattttctagtttatttgcgtagaggtgtttataatgtttttctgatggctgtttgtatttctgcagggtcagtggtgctatcctctttatcattttttattgtgtctgtttgattcttctctcttcttttttagtctagctagcagtctattgattttattaatttcttttcaaaccagctcctagattcattgatttttttggagagttttttgtgtctctatctccttcagttccattctgatcttggttatttcttgtgttctgttagctttgggatttgttcttggttttctagttcttttagttgcaatattagggtgtcgatttgagagctttctagctttctgatgtagggatttagtgctataaatttccctcttaatactgctttagctgcatcccagagattctggtacattgtctcttgttctcattgtttttagaggacttctttacttctgtcttaatttcattgtttacccaggagtcattcaggagaaggttgttgaattttcatgtagttatgtggttttgagtgagtttttaaaccttgagttctaatttgattgcactgtggtctgagagactgttgtgatttcagttcctttgcatttgctaaagagtgttttacttccaattatgagatcagtttttgagtaagtgccatgtggcactgagaagaatgcttattctgttgttttggggtagagagttctgtagatatctatcaggtccacctgatgcagagctgagttcaagtcctgaatacccttgttaatttactgtcttaatgatagtctgatattgacagtgggtgttaaagtctcccgctattattgtgtgggagtctaagtctctttgtaggtctctaagagcttgttttatgaatttgggtgctcttgtattgggtgcatatatatttaggattgttagcttttcttgctgtattgatccctttacgattatgtaatgcccttctttgtcttttttgaaccttgctggtttaaagtctgttttgtcagaaactaggattgcaacccctgctttttcctgcttttcatttgcttggtaaattttccttcatccctttattttgagcctatgtgtatcattgcatggagatgggcttcttgaatcttgaatacagcacaccaatgggtcttgactctttatccacattgccaatctgtgtctttttttttttttttttttgagatggagtctcgttctgccacccaggctggagtgcagtggtatgatctcagctcactgcacttctgcctcttggattcaagtgattctcctgcgtcagcctcccaagtagctgggactacaggtgcatgccaccatgcctggctaatttttgtatttttagtagatatgtggtttcaccatattggtcaggctggtctcgaacttctgacctcaggtgatccacccgcctcggcctcccaaagtactgggattacacaacatgcatgaaccactgtgccaggcccaatctgtgtcttttaattggagcatttagcccatttacatttaaggttaatattgttatgtgtgtttgatcctgtcatcatgatgctagctggttattttgcagactagttgatgcagtttcttcatagtgtcgttggtctttgtacttcagcatgtctttgcagtggctgatagtggtttttcctttccatatttagtgcttccttcaggagctcttgcaaggcaggcctggtggtgatgaattctctcagcatttgcttgtctgaaaaggattttatttctcctttgcttatgaagcttagtttagccaaatatgaaattctgggttggaaattattttctttaagaatgatgaatattggcctccactctcttctggcttgtagggtttctgctgagaggtccactgttagtctgatgggcttccctttgtaggtgacctggcctttctctctggctgttttaacattttttccttcattacattcttggagaatctgatgattatgtgtctttgggttgatcttctcatggagtatcctactgggattttctggatttcctgaatttgaatgttggcctctcttgctgggttggggaagttcttctggatgatagcctgaagtgtgtttttcaacttggttcctttctccccatctctttcatgtactcctatcagtcataggtttggtctttttacatagtctcatagttctcggaggttttgtttgctctttttctttctttctttttttttttttgagacggagtctcactctgtcacccaggctggagtgcagtggcacaatctcagctcactgcaacctctgccccccgagttcaagtgatctcctgccttagcctcccaagtagctggtattacaggcgcctgccactgcgcctggctaatttttgtatttttagtagaaacggggtttcaccatcttatccaggctggtcttgaactcctgacctcgtgatccacctgcctcagccttccaaagtgctgggattacagggatgagtcaccgagcctgtgcttgttcattccttttcattctttttttctcagtcttgtctgcttgccttatttcagcaagatagtattcaagctctgatatttatccttctgcttgatacctgtgttcgcatcacgaagttcttgtgctgtgttcttcagctccatcgggtcatttatgttcctctctaaactggttattctagttagcagctcctatgaccctttatcatggttcttggcttctttgcattgggttaaacatgctcctttagcttagcaaagtttattacctactttctgaagccttctgtcaactcatccatctcagcctccacccagttctgtacccttgctggagaggagttgtgatcatttggaggaggagaggcactctggccttttcagttttcagcgttttttcattgattctttctcatctatatgagtttgtctagtttcaatctttgaggctgctgactgttaatcaaggaaaatgacaagaaaagtctcaatcattttaggagatttatttgccaaagttaaggatgcacccgggaaacaggtctatgcctttctctgaagatgattttaagggctccaaatttaaaggggaaagggtgggatattgagaagtatacagttttcatgcaagtgaatctgcatttttacatacaaggacataaaaggggcagaggaaaaatgtggggaatcagcattttacataagataacacaaacagaatgtggtagggaaacaatcagatatgcattagtgtctgtgggccaggatgacagcacctggaaagataagctatcaatttgcattgccatggtgaagttttaaccattcactaggaatatccttgtgggcaaatatgggggaggcatgtagcttttcatcttgtagccatcttatttaggaactgaaagtgggaggcaagtttgcatgacccagttcccagcttgactcttccttttagccagatgcatttggggtcccaaaatttaatttcctttcagtgttttttttcattcattctttctcatcttcataagtttgtctagtttgaggctgctgacctttggatgaagtttttgtggtgacttctttgttgatgctgttgttgctttctgttagtttgtttttctttaacagtcaggcccctcttctgtaggactgctgcagtttgctgagggttcacttcaggccctattcacctgggtcccttctgcagctggagatgtcacccgaggaagctggagaacagcaaagatggatgcctgctccttcctctgggatctctgtcctcgaggggcactgacctgatgctggtaggaacgcttctgtataaggtgtctggtgacccctggttggtgggggtctcacccagtcgcggggcacaggatccgggacccacttaatgaaacactctagttgtcccttggtggaggggatgtgctgtgctggggggaaacccactcatctgggctgcctggattcctcagagctagtggaggaaagtaagtctgctggtttgtgaaggccatggccacccctcccactaggggctcaggctcagggagatcagaatcttttccctaaggccctggctggggtagctgaagttcctgcagggaggcctcgcccagtgaggagggatgggtcagggtccagcctaaagaggcagagtccacaatctgccacaactggtgtgctccactgtggggaataccttctgggtccaagacatccaatctccctggcaccagcaggggaaaaacggcagccccgagctgtagtgatggctgttgcccttccccagtgggggttcagccttttaggcagccgcagtgatgggagctcagacgtcgtaagcagcaggcagctgcagttgcagtgatgatggctggccctcctccccagaactcggtagtcttaggcagactccggcccaaccgctgttgagactgtgcagctctgtggttgggacctaaggccctggtggtgtgggctcatgagtgagatctcctgattcacaggttgcacatccatgaaaaaagcagtttccaaggctaggtaacattgaggtgggcaaataaagagagaacgttagagagagaaaaataagtttaaaaaaggcaagctttctgtactatgctgacacatcccaagggcagtaacaggcatagcctggacccaggtgaggacctgataacattatctaagtggctggagctggaaggaatgtgctctggagactttcccaggggtaacaaagaagtaaattttccctgtgtctttagcataagtaaaagtccctttgaaccccctccagtgtgtgattgtacccactctgcaagttttatgaggtcctgtttttctgtagctaatttcatgcgcgcgtctgtgtgaagagatcaccaaacaggctttgtgtaagcaataaagctttttaatcacctgggtgcaggcagcctgagtccgaaaagagagtcagcaaagggtggtgggattgtcattagttcttatacgtttgggataggcggtggagttaggagcaattttgttgcgggcagcgggtggatcttacaaagtatattctcaaggatgtggagaatattacaaagtaccttcttaagtgtgggggagaatattacaaagtaccttcttaatggtggggagggtgtatagtacaaagtacattcacaaaggcaagggaatatcacaaagtacattattgcgagggcggggagggtgtattgtcacaaagtcaattgatcagttagggtggggcaggaacaaatcacaacggtggaatgtcatcagttaaggcaggaactggctgttttcacttcttttgtgaatcttaagttgcttcaggccatctggatgtatatgtgcaggtcacaggggatatgatggcttagattcagctgagagacctgacatttctgtcttcttatattaataagaaaaatagaacaaaatagcggtgaagtgttggggcggcaaaatatttttgggggtggtatggagagataatgggcaatttttctcatggctgctttgagcaggattaggggcagcatgggaacctggagtgggaaagattaaagaaagattttggggtaaggggtgatattgtgggtttattagaaggaacatttgtcatatagaatggtgatggcctggatgcagttttgtatgaattgagaaactaaacagaagacacaaggtccaaataagagaaggagaaaaacagatattaaaagactaagaaatgggaggacccaggacatccaattagagagtgcccaagggggttcagtgtaattatttgcttggttggtgagtttttgggctcaatccttgagtttttgatgttgtcatataccaggccagattgatttaggtaaaagcaacactcttcttttaaaaaatatacagagtcccctttttttttagcagtaagtcaaagcctcggcgattttggaggaaaaagaaatgcaaagccaacaatcgtttgttaaagaaggtttagaaacggctaggagagagtgagtgagattgatagtgtggtggaggtagctggggagaggtagagggtggcacaagaacgggaatgagaataagagtgagtgtaaaagtaaagaataggacttcatcagggtgaaagtattggagtgtgccctgtgagcaaagatcatctatccactccaagagggagtcaagagtggcggattggggatagtactaggagatatccgctgtgatggtttggaggaaaaatgtaaactggcagtgtaaacaggggcacgacacttatgagtagttgagaatggtgaataggaatatgactagacagaagatagtagggatgacaagtttttggggtgcaatccaagtgggaggggtgaatgcgtaaagctttgttgggaagagtagggtaaggacgaagagacctaataaaaatgataggatgtattaggcttataagggttactattatcatttaggaatgcgggtgagtttaagggaagtagggttgagtacttgcgacttccaggaggaagaggagagatcaggctgtctgtctgacagacaaagctttattctggaatggtgaacccaatggggagggtcctgcaggcggacagcagttggggtactagagatgactaagtagggtccagtccatcgaggttgtagagtttgaagggtcagatttttaacaagaacttatcatccagctagggtgtcttcatatggctgggaatctggagtaggcaagagaagatgagcagcctggcaaatttcctgtctagcctgctggaagactggaagatagtcgcctagagggctggtgtctggggcaaggttgggtccgagcaagaaagtgcatccatataaaagttcaaatggactgtaccctgtagcatctcgaggacaggctctaattctgagaagggcaagaggtaaaagtactgtccagtcctttttaagttggaggctgagcttggtgaggtgtgtctttaaaagaccattagtccgttctacctttcctgaagattgaggacggtaaggggtatgaagcttccactgaatagagcctgagaaactgcttgggtgatttgactaataaaagctggtctgtgatgagactgtatagaggtaggaaggccaaaccaaggaattatgtctggaaaaagggaagaaatgactgcggtagccttctcagatcctgtgggaaaggcctctatccatccagtgaaagtgtctacccagaccaagaggtattttagttgcctgactcagggcatgtaagtaaatcaatttgccagtcctggacaggggcaaatccctgagcttgatgtgtagggaagggagcgggcctgaacaatccctgagtagtagtagaatagcagatggaacactaagaagtgatttccttgaggatagatttccacgatggaaaggaaatgagaggttctaagaggcaggctagtggcttgtaacctacatggaagaggttctgaaaagatgacagaatagaatgggcctgtgaggctggaaggagatatgttccttggtccaagaaccatttgccttgtgtgagaggagattgataggtggaagttacagtgggagagtaggtgggagtgactgatgagaaggagaaaaactggccatgagggacagaagttggaatgctagctgcttcttcagctacctaatcagcataagcgttgccctaagcaatgggatctgatgccttttgatggcccttgcagtgaatgactccagcttcctttggaagtaaagcggccttgagaagagtttttattaaagatgcattaatgatggaggacccttgtgtaatgaggaaacctctttcagcccatataacagcatgatggtgcaggatatggaaggcatatttagagtctgtataaatattgatgcgtagtccttttgcaagagtgagggctcgagttaaggcaatgagtttggcttgctgagaggtagtggagtggggcagagcagtagcctcaatgatagatgtggaagatactatagcatagcctgcctttgctagtgattggtgattaggcttggtggaactgccatcaataaaccaagtgtgatcagggtgaggaacaggaaagaaggaaatatggggaaatggagtgaatacaagttagatcagagagatacagttatgggggtcaggtggggtatcaggaataatgtgggaggctggattgaagtccgggccaggaacaatggtaatcgttgcagactcaacaaagagtgaatatagctgaaggagccaggggcagaaagtatatgcatcaggtgtgaggaagaaaatagattttggaagttatgagaactgtagggagtgagttaagcatagtttgtgattttgaaggcctctaaaagtattagagcagcagcagctgctgcacacagagatgagggctagtctaaaacagtaaggtcaagttgtttggacagaaaggctacagggtgcagtcccagctcttgtgtaagaattctgactgcacagccctgtacttcagctgtgtgtaatgaaaagggttgggatgagttagggagagcagcttttagggttgttttttaaggaatggaaaggggaatggggaaaggatttaggatttatggggtcagctaagtttccttttgtgagtttatataatggtttagtcaggatggcaaaaccagatatccaaaggagaaagtaccttaaccatgcctaggaaggaaaggagttgttgtttgtagaaggggttggggtttgggagattagccggacacaatcagcagggagagcacgtgtgtttttatgaagaaaggtgctgagataggtaacggatgaggaagaaatttgggctttggagggggatatgcaatatccttttgagaatagatgttggaggagcaggagggtgccctgttgggaagacttgtagggtgggctataaaggagaaggttgtcaaaattttgaataaggtgagaagcagatggacagaaagaaagtaaatcatgagaaagggcttgactgaagtaatgggggctgtccctgaagccttgtggcagtacagcccaggtaagttgctgggactgatgggtgtcagggtcagtccaagtgaaagtgaagagaggctgggatgaagggtgtaaaggaatagtaaagaaagcatgtttcagatccagaacagaataatgggttgtggagggaggtattgaggataggagagtatatgggtttggcactatggggtggataggcaagacaatttggttgataaggcaaagatcttggaccagcctgtaagacttgtctggtttttggacaggtaggataggagagttgtaaggagagtttgtaggctttaagaggccatgttgtaacaggctggtggtaacaggctttaacctttttaaagcctgctgtgggatgggatattggcgttgagcatggtaagggtgattagattttaatgggatgataaggggtgcatgatcagtcgccaaggagggagtagagggatcccatgcttgtggattaaggtagggagatacaaggggaggattcgaaggaggctatgaactggggaaaagggtggcagtgaggtgtggctgtagcccaggaatagtcagggaagcagataatttagttaaaatgtcttgacctaataaggtaactgggcaagtggggataactaaaaaggagtggataaaagaatgttgtccaagttggcaccagagtgggggagttttaaggggtctcgcagcctggccgtcaatacccacaacagttatggaggtaaggggaacaggcccttgaaaagaaggtaatgtggagtgggtagcctccatattgatcaagaaggggatggacttaccctccactgtaagagttacctaaagctgtgatggtccaggaggtttccaaggtgatcgggcagcgtcagtcttcagccactaagctgagaagatctgggaaggagtcagtcagagagccttgggccagagttccaggggctctgggagtggctgctaggcgaattggacagtctgatttccagtggggtccgcacagatgggacatggcttaggaggaatcccaggctgtgggcattcgttggcccagtggccagatttccagcacttgaagcaagatcctgggggaggaggtcctggaggaatgcctggctgctgtggtttaggagtttcaaagttcttgtgtgctagaaatgtgtgggtggggtttctctcacagtggaggcaagtaattgcaactcagaaatatgttggcacttggctgcctcttttttattattgtacaccttgaaggcgaggttaattaagttcttttgtggggtttgagggccggaatctaatttttggaactttttctaatatcgggactggattggataataaaatgcatattgagaataagacagccttctggcccctctgggtctagggcagtaaagcatccaagggttgttgccaaatgggccatgaactgggctgggtttttatatttggtgaaaaagagcctaaatgctaactgatttgggaaaggtctgatagagaaaaaggagcattaaccttgactatgcctttagctccagccacctctttgagaggaaattgttgggcaggtggcggagggctagttgcggtacaaaactgtaagccagaccaggtgtgaggaggggaggtgatagaaggattatagggtgggggagtggaggccgaggaagaattgggacctggctcagcctggcgaggagcagcctggggaggaggggagaggtcagatgagtctgtagtaaaggaggattcaaaggactcagagcttggggtggagactgaaggaacagtcaggagagaaagaaggatttgggatgggtcgcattgtgagcagagactagggaggaaccgaggtgtaaaagaatgcctggacatcaggcatctcagaccgtttgcccattttttgacaaaaattatctaggtcttgtagaatggagaaatcaaaagtgccattttctggccatttagagccattatcaagtttgtattgacaccaagtaatgttgcagaagaaaataaaatgcttaggttttaggtcaggtgagagttgaagaggttttaagttcttaagaacacaggctaagggagaagaaggaggaatggagggtggaaggttgcccatagtgaaggaggcaagcccagagaaaagagagggtagagacatggaggaggagggagtggtacttgccacccaggggaggtggtgcttgccacccaggggaggtggtacttgccaccaaggtgaaggatcaaggcaggcatccccgcagtgatcagacatccctgaaatgtgggtgaataatcaggcaggcatccccacagtgattaaacaccaacggaagactgtctggagtgaccagcgctggagttttgagtttatggataaaacacgtctcttctgtctctaccagaaagggaaaggaaccaaaattaaggaagggagagattgaagggtggagcaacagcaagagaggttggagaagagagtgaaaagaccgcttacctgatttgaaattggtgagatgttccttgggctggttggtctgaggacccaagatggtaggtggatctcctcatggagtgagggtgaggacaggggactggtctcccgaaggagtccccctcccccgggtctttggcaccaaatgtcacgtgtgtctgtatgaagagaccaccaaacaggctttgtgtgagcaataaagctttttaatcacctgggtacaggtgggctgagcccaaaaagagagtcagcaaagggtggtgggattatcattagttcttataggtttggaataggcaatggagttaggagcaatgttttgtgggcagggggtggatcttaccaagtacattctcaaggatggggagaatattacaaagtacttttttttttttttgacggagtcttgctccgttgcccaggctggagtgcagtggcgcaatcttggctcactgcaagctccacctcccaggttgacgccattcttctgcctcagcctcccgagtagctgggactacaggtgcccgccaccacacccagctaattttttttgtatttttagtagagatggggtttcaccatgttagccaggatggtctcaatctcctgacctcgtgatccacccacctcggcctcccaaagtgctgggattacaggcgtgagacaccgcgcccggcccaaagtaccttcttaagggtgggggagaatattacaaagtaccttgttaagggtaggggaggatattacaaattaccttctcaagggtggggagggtgtatcatacaaagtacattcacaagggtgggggaatatcacaaagtagttatcacaagggtggggagggtgtattgtcagaaagtcaattgatcagttagggtggggcaggaacaaatcacaatggtggaatgtcatcagttaaggcaggaactggctattttcacttcttttgtggatctttagttgcttcaggccatctggatgtatacatgcgggtcacaggggatatgatggcttagcttggactcagaggcctgacactaataactgtaagtttctgtttttcgtctgagctgcataacaaaggtcacaagacatgttcgagtaagcctagattgtagccctccaggcaccacagcaaaggacataagtttggacaagattcctttgagcataagctagataacagccatcggggccacatagcaagagacacacgtaaacctgagttatgaacctgtcactgtttgataaactgcctttgttctgcttctgtacattcacttttcatgccactcagaagaaggtgtataagcaagaccctgtctttgttcagggcgcagtttttggatgttaagtctgctgggtctgagtgtactcaataaagatgctcctgtatttcaccctcaggtctctctggtcctcctgattcctgcaacaacacaatcactcactgccttttttggctgaggatgggggctccccttgtcccctgtggctctccagtgttggttttatgatacatcaaaaactaatattatactttcatattctcattgcttgtttcatatcagtggcagcaatttttccaaataatttagtatacaattaaagtggcaatgtagagtttacttaatggacttgttataattaggaaccagttttatacacagagaatccataaaaatacaacttttttgctattttatcctttggctatgcaaaaagttgttcaatgtttactgtaggtgtttgttttaagcatgcaatacagtttatagtggagataccttctgacaagaagtaaacacccagaagtgatttttgtcttcattagaactcattactatttgtctgttttccaagatgatacgatacatcatgatcttatattttaaaattctgtttctatatgtaatttaaataagttattttacttatacaattaatgtttcattctgtatttaaatttcctgtaagaaatattccttgatttaataatgaggagctttgttatttttttaaaatatggtgacatgtttctttataattatgtacaattttttttacttctagcaacataaatactgagtcatttattctttattgctcataccccagggtagttgttgagttatcttacatgatgtaagtaccgtcttttgcagtactttatactcttcgtttgttttgttatagccagaacattataaaatccagttcttagatcagacatatgttgaaagtaaccctttttccacttgaattgttaaattgtttaatctagcatctttactcctacaacttgcagtaccattctttgttccagcacattggatgtcacctctatatcagttggtcctgtcccaatagtggcagaatgatatcaaaaagtgaaggtctcagtgtaatatgaagcctcagtttttaaaataagtatgtatatctgttggatattctggtggtagtctcaaaaggatgacctgataaactgacaggcatctttaattaatgggacaacactgagaggtattcatatggcaataaaaagagaatagaagagttaagcaataagccacccacaccgctctgtgagcataatggatatgatcacacccacattgccaagtgtgtctgccaaaacatatggaaatacatctttcttctagcactcatgcctcattaatggctgtaactgtttcacagtcatggtgtccacgtatatgatactaatggctatgattagatgagtcacatcttcattgagtagctcaataggtattgttatgggcatagataccaatcaggtttactaccagccccgtagctgagactggtgttaatatgtgtatctagtcctagaggatcaattgaaccactgactaacacaaaaacaagttttgccattagaaaaatctattaatagaaacccaaacctcaccattatgaagtatatccatgtaacaacctgtaaatgtacaccccgagtctgtacaaataaaaaagattacattatgatgaaatggtgaaacagaaagctttgttacatggaacttttcctgttgcattcaaaactgcttcattaaatagtcctgcagaatagactctacgactttcaaagctaggagaaattggagtgaccagtttattccttttatgaagaattatccctgagatgccgaacatctgtgtgtcagaagctcccagctaactttcaaaaggcagtttaatttccaataatagtaattcaacaaaactgagagtttaaattaggcaatttaactaataggcaagtattctttgttgtgcttcacatttattttggaggtccaagatctgcaattatgacaaaaaccaccaccaccacctgagggtacattctgtttggccttaaataattatagtggcccccaccccatgtcagaaattggtttcagagtggactagtgaccctgtttttccaatgagaaaggaaaaaagctgtggggcttctaggaaggtccctccttcctaagaaaaagactgagaatctctttggatctctggacattgctgtgtttggatgtgataccagaactgttccatccatgtgccaggagcctggaggcgaaaccagtacagtcaggaccacaaagcatagatgaacacaagctgggaccttgaggacatggatgagtggctgaatcaaacagccctaaaacttgtttgaccttagaactttcaaatatgttagagaatagattttctaatagcttaagcctgcagaggaggagtgggagtagacagcttgtcgctgtgatggctgccagtggctgaaagtgatttggaagaatcatcacattctggatgtaatgtaatgttttggtttggtttttacaaatctgctatcaaattgatgatgtggctcatacttggtaatggtgtcaaggaaatacagtacattagagctgctgctcagagtggaaaggtgcatgttaggaaagaggtcaattccttcaaaacacttgtaagtttgttttaataccaattgaaatacaaatggaattttcttggagaaaagaaaaagtctattaataaattgagagagaatttctatttgggtgcacccataggagaaaaatcccattgcattccatcttttcatcagggcagcaataaatatcatgactaaaacacatctgtcatagagtgtgtgaaatacatctgagatgagacccagactgctggtcaacacatcatagaatgattctacagaggcaaaaagcgttccgtcctctcttagagggagatgaaaagacgttggtagacaaaatgaagacctagtactcactatcactcctccagacaggatgtgttctgcactttcctggtatgccattttgttcatagcctgaagtcagactgttgttggatgtattcagaaatttccaaagcactaataaaaacaggaaaggatcaatcatggggacatttggaaacttccattttgactgaacaaatggaatccacgtagatatccaggattacgacaaagaagataagcattgtggaagccataaagggagaaatccaagatttatctttaacctcagttgtcacaggaaagacaatgacccatgggcacaagagaagcaggaaataagatgggataaagcttgaagacttttggctccactgatgtctatagagagctttctgggagctgtatgaaaaccagctttacaccacaaagccaagactagcaataatattccatgcttgttatctgccatgtctaagaaggcaatggttgtgtaaagcatgtaagttagagccctgaactaccctaattaaatggggtgttcagccgttttagccttgagatcatcactgtcaaaaaacagcaataaatagatgacagcaataatgaagaaagcagtcccctgtattgaagttctgctctgtgttacaaaaagagcttggtttatggctgtatttcttagagatgagagacaaaatatacagacaatggccagaccacatataaaaacagaactctgacccataacctacagcagcctgcctaggaaatcaacccacttttctacaataaacagcccaggaagccacttgctgtaagtcacacttgtaggaagtcagactttctctggtaacaatccaggaaactaaacagtaactccagtaacagtcagctccaaatggccaggactttattaataactgacaacttcccaaatttttgttcctgtttctaacttaggagcaacgtaggaaagccaaatacgtaccctaaaccaatcccataggatgctgtgcatctagttagctatcctcagcttccccatgccaacagcctccaatcagggaacatgcgaaaaaaagggtgataccttttccactataaagctttcctactcctctgctggtctttgagtctctcccaaaatggaagtgatggtggctgacttctttgttgtagaatagatagcctttactttcttatttggttagtctttgttttcacagaagttattggcgaactccatttattaaagtcatgggtgctgatatggtttggctctgtgtccccacccaaatcttaccttgaattaccccacatgttagggagggacatggtgggaggtgattggatcatgggggcagtttccctcattcttttctcgtgatagtgagtgagttctcctgagatctgatggttaaaaagtgtggcactttctccttctctctctcctgccaccatgtaagatacgccttggttcccctttgccttctgccatgattttaaatttccagagaccttcccagccaagcggaactgtgagccaattaaaccacttttctttataaattacccagtctcaggcagctcttcatagcagtgtgaaaattgactaatacaggtgctttttgaaaatgcagtttcctggactccccacaggtttacagaatcagaatctctgggagtaaggcccagaaatttgcattttcatccatagccctagtggctctcatgcatactaatattgaggaccagtgtcctagaatatttggtgattatctttctctggcatttgtatcacacctatgttcatccatagccctagtgactcttgtgcatgctaatattgaggaccagtgtcctagaatatttggtgattatctttctctggttttcgtatcacaactatgttatgtgtatgaaatacctaactatccccacttgtgtgtttcaaaaggtccttttgcctacaggagcaggctaaatctcatgacattccccacactcaatcctcacccagaattcctgagctctggggaaggtgccatctccagcctggtttgcaagccagaaacacaggctctctcttacagggaaaatgaaaatacattttaaaaatgtgaataacccccaaaatatcaggtaaggcacataaaacaaaaataaggcggcgtcagtagaaaacacaagacaaaatgaaatgcagcgaatcactggaaatgttgagggaagtagcagttctgggtcaggggaggcagaaacagctacagcttgggagctgtggccagtgtgttctctgagaggtagctatgcagacccaagctaacagccaaccccagaaacctcagcctgattcagattcacctcagggtgaatctggtgactcagcctgagtgggagcagtttcactacccgactctctgtgtaatttaatcttgtgtttgcagccaatacctagccaatacagaaaattaatgtatgggaggaggccagctgctcttgacatggaaagttcagattattttcaagcttcaagaagggaaccagcgacagggataaatgaatgagtagagccacttaccagcaaaaagcgttggaattttttctataccactccagcccctcattgcagggctgctgtagagaactgatgtccccagttctgcccatctcaggtatactccaggaggctcgccggctgacagcttccttgctctgccgcctgtgtgaaggggctgccactctctgttctcaggtcttggtgactgatgatgggtccatttttccttttgttgatgttataagtgggactgttaattctatttttggattgttcatttcccaatctttttttttattattatactttaagttctagggtacatgtgcacaacatgcaggtttgttacatatgtatacatgtgccatgttggtgtgctgcacccattaactcgtaatttacattaggtatatctcctcatttcccagtcttttaagacataccaaataattttctctgtgagtgtgagcttacagaaaagagctctcgttgtctttctggcagcaacaccgttgataatgcattgctggcaatatctacttgtggttttctgtaaaaatgctgtgagtttaaggacatttacctaatagtctgactgggaaatcctagattttagtaattaaaaaaatacattgctttgcctctagcaaataagaacaatgtctctttgctgattcagatatattgaatctttccaaagcatttgctttagttaaagcaatttttgattagtattattctaattagaacaatttttaaatttttacagatgaggtttcactctgttgcacaggctagtctcgaaattctggccccaaggaatcctcctacctcagcctcctgggttgtggggattacatgtgcttgctactgaagcgggccaattagtatttttttaatggacaagttataattgtgtgcatttatttgatacaatgtgatgttctaattcatgtaacggagttctgggaaagtcataccaacctacagtggtacctttgtggaaagattaaatcaagctaattaacatacccattaccttgcttattatttttagttttaatagagccagtaaatcttttcacactcgaatttaacttatattaaattatttatattgtacaacttacacaagttaaattaattaacttgtttatcttatattaaattaggcaattataataactagtaaaaattttatatactggtttggcataaacttaattgattggagtaaaagtaggcaaggatttgattctaaaatgaagccttaaaatcttgagctttattttgactatttttttctcattatgtaaggtactttattatttatttttaaaataattttaagctttaattgagctaagcctattcagtaagtttttcagtatacctagagaataaaggttaattgaggctgcagttaggaagatttctctctttttaaatttttatattttgtagatattttgtaggtatgaggtgtcactatgttgcccaggctggtcttgaactcctggcctcaagtgatcattttacttctgcctctcaaagtgctaggattacaggtgtgagtcattgcaccaggccaagaagaattctcttaaaagtcaatttttttttctgattgaattggtggtttccagtcccttcttttttgttgttttttgtttgtttgtttgcttgcttgcttgatttttttagagacagaatttgtgctgtcacccaggctaaagtgcagtggtataatcatagctcactgcagcctcaaactcctgggcccaagggatcctcccacgtcagcctctcaagtagctgggactacatgcatgtgccatcaagcctggctaatttttttgtatttttagtagagacggggtttcaccatgttggccaggatggcctcgatctcttgacctcgtgatccacccaccttagcctcccaaagtggtgggattacaggtgtgagccaccgcgcccggactaccatctgttcatttttaaaatgaatcttgcttgggactacaggccccagaatggagatagcacttcttcctgcaggaaccagggaccacctcactctcttgacactacagagcctgccttccttagcccctgcttgttaggtgctcctaaatgcaacctttgtggccatacttagcatgcagtgtcctccctcaggctgtgagcatacgtggggctaataatctactgttgattttatccacccagaattaacgtcctgtgttttgccatccccacagccctagggtgggcatccttttcttataaacaaggtaaacaggaggcaattaaaacaataaaaaattttaaagagaagtttagtgttcataaatgtctttaacattaaaccaccgatagtctagaggcagcctttcaaacttctataaattggaatagactttggagatgaatcataacggctgaatagatgcaggtatgtttgtctcccccacagagaaaaccagaatagcaagtagatactcacatttcaaacaaatggtctaggagagaatgctgaggttcaccagagaagagatgggaagcaccagaagtaagaaaagggtttgaggcagcttgcccacctgggattgactgagctgggagaggctcctggaatgtgtggggaagcagtaagagagaaagcccctgggctccacactcctagacaggcttttataatcttggctgtgggagaaaccccggactcattagggcctccggcctgacatatgaagctgcccaaagatgttgctccagaaagggaacccccacacactcccacaggcatctgaaccctgggcagcctcagatgggcaccattttgagagcccagacatcaggtatctacagacagctgctgccactttactgctgcaaggaggcagaggggagaccaggcactcccatgcacccctgggagagttactgcctccctgctgaaggctgaagttgagacttacacgtgagcagactgcattccccatagcttcttgcccatgctgcttgcctgcgagggacctcagcctctctggttgcaggcccaaggtgcagtttccatagtttaagttcaggctgtgccctgcccttggcctcagtttgagttgacatggctgcagctgtggcccggtttaggagggacagggagtccagactcccttatacatactcaagataatactcaacaccctgctatgggatgatgcttttctgggagggatctctgttttgtctggtcacaagcccacagctggcaccattttgagagtttaacacttggctgtgccccgccctccaggtgagtttgaggtgatgagttccacaccctgctgggagaggaacagggtagactaagctctcttaccaaacagggtagtccaagctctccagggtacaccacacttaggacagtgaccactgcagtactacaagtgactgtgggactggggacaagcctgccaactgatcgcatcttcttgtaacaccaacatggagggcttgggtcccagtgagctgttctaccactgctactgctatctcccatgccacaccagctgcccagaggtctgagaacctgcccacacacagggatcatcgttcccactgcaagcttctaagccagacatctggaggcccaagaatcagcccctagaacctactgactggagccagggtatgctgctctggggcctaaaaacagtcattctcatcccactgctgctactactggggccaaagactggcttagttgacgtccaagttcccagttaaactttactacaacctcaactaatagctgtagcttaagccactgaggaaatcacagataccactgaccctgaatactgccaaagaagtcatgcaaagaccactctactgcaggtcaattgggataatttccctaaccccttcacaagacttgtgacagaggtgcctcactcgctcagcctgtagtgctcaattgctcaccagtgggtggggtggggtgggggtgcagcttgccggcaaggggatgcaggagcccgggtaggtgtgttttgggcactggcaggagcacaactgtgtactggccctgcagcagcatctgggggatgcccacaactcatgaagcctcagagggagtgttacagtcagtgctcttttggctctgccatccatgaatggcttaggtgttgaacagctcggtgtgacagccctctgtatcctgagctcctgctcagtgtccaggaagaatcaggttgcatgaacgaattgaagatggtaaatgtgggggattttattgccgatgaaagtggctctcagcgggaaggggagctggaaaggggatgaagcaggaaggcattcttcccctgaagtctggccatccccagctgggctcctctccaaagctatgtcattgagccatccctctgaagtcaagttgcttctctccgaagttcaactgtagtctccgatgtccagctgcttcgtctcttctccccttgtctgccgtctgccagtggagcctggggtttttatgggtacaggacgtgcctcctgttcctatcacagtgccccaaatcaaagtgtcttaacaacatatattctcaggaaaaaattatcccctacaaaagcaattttaacaaacttgactttaacagacttgactgctacaccagatgtgtagatatcaacagaaggacacagtcaccatgaaaaagcaggaagataggacaccacatgaaagatcataacaattttccagcaacagatcccaataacaaagaattcctcaaaatgccagataaagaattaaaaatattgatcttaaagaaaatgcaatgcaatagaaatctgaaaaccaatacagagatatcagaaattcagtttgggatatgaatgagaaatttaccaaggagatacagatattataaacttctataatttggttattgcatagcatgatgcatatagtaaaaaaatgtatatttcaaaactattaagagagtaaatttcaagtgttcttaccacagaaaaatgagaaatattgaaggtaatagatatgttaatttccttgagtttaattattccacattgaattcatcagtcatgctgtaccccataaatacaactataatttgtcaatttaaattaaaaaattaaaaaataaacttaagaagccttaggtttatttttaattcatatccaacttgtagccctttttaaaataatttatttgcatttcaagatacatatttgatggaacatgtacatttttcagcgcttagaaagttccaggcaccactatagtggtggctcactcctatagtcccagcactttgggaggtcaaggcaggcaaattgcttgagctcaggggtttgaatccaatctgggtaacataatgaaaacctgtctctaccaaaaaaaaaccaaaaaaccaaagttagccagatgtggtggcatgtgcatgtagtcccagctactcaggagaccgaggtaggacgatcacttgagcccaggaggttgaggctgcagctgcagtgaactgagatcatgccactgcactccagcctgggtgacaaagtgagatcctgtcttgaaaaaaaaaaaaaaagaagaagaaaagaaaatttctaagattttcctcccatcctacttactccaacactcatagcctgagcatcttcccaagatgcatctcaacagcccactgagaggagtagtattttctctcagctgtggagaaagaaaaattgaggaattatgagacaaagacaagaagagaggaaagatgtcagaattagccagagataaaacaacggtgtcgcacgtgacgactatctgaggttagtgtcacgtgagtagtaaaaagaattcaccaagacagttgtaaagaaaggcagattttttagaaaatgtaggtaaagaaaggcagattttttagaaaacgtagaaaaattgttgcaagaaagcaaaggcaaaacagcaagtgcggagctgactgcaaagagacaaaggcttgctggggattttataggttggtgcttgtgctggagagagctacttagagtactgataatggtaaggttgcagtgagctgatttgcatatttcttttttaatgaaatttaacttggcttttactgcatttttaaaatgtaaaaatgtaaaaacaaacacaacatagtatttcaatgctgtacctttatgcaaatgacttcatctatctttttaaaacatgctgtgatatagctaatgttaaaactgacacagcttcactttcttctttttctctgtactgaaagctgcagaaatacacctttaattccaagacaatttggttgaagccctcaaaataaaaagtgtacatccacttccattgccctgactttccccacattgttgattgtgattctctgtgccatgttggtagatcaggcaggctatatataatttgcacaaaacatctttagccagggtaaggttttagaaactatcttaaaaagaaacttgtcaaaatatttttgatatttaggacaaatactaaatattataattttctcccagcacatctgtttacacagcctagttagctagctgaccctgttaaagatcagcttatggaacaaataggtgaagtcatttcctgagccaaaagatacagataataaatgttaataatagcagcagactaaaaacattcctttttgttgtttgttttccatagtcaacagttttagcacaaggactttagaaaatgacagatttttttggtaaagtttactgcctgaaaagagtttaataaagaacatccaaggcctgattgctgttattctgaatataacttttaattactttctgtaagttacattcggttactgtcagacaacttactgttgcatggaaaaatgccccaaaaaactgcaatggtttacatacattttacattacacgtattacctcttaaaacccccaacagaataaagtcttagcaaacacaaattttaatttctgaacacccttccagtaagattgtaaaggtgggaggaaggggaggaaggacttgttttttgtattcctagtctacttgattaaaatgtaatcttccaagggtttgtttagctcactatccagactgctagggttatgatgaacattattacttctttccagggtaaaaaaaatgacatttgaaaataatgtaaatgctatgacatgattttcccaagcatgacctcaacttgaaacattagattacttaagaattctaaagattggtataccaccactgcaccagaatttttaattattccaacagctacaggaattttttaatagtttttttaattttatgaacttaaagctgaagaaaataaccgatttagaaaccataataaaaggacagatatttagccagagatatcagttcctcctgaaaaaggatactgacctcctctcactgcagtttttctccaggtatcttactgatttcagatagaatttaaaattcatcttaaaaatagaaacaaaaggactacttaaactgacattaactaataaaaatatgctcaaatttactgacagaatcatggacacttcatacaatacttagactctaccagttttaagtaaagtaaggaaaaaattataattacaaagccagtctttccccttggggaaacaaaaaagccacttttgaccaattgttccctgcatatacatatactgtatattattataagcttcttcagagaagcaaaacatctttgtcttcctgacactggattatttagcatgtttttttacatcaggaaggcaactgcactgcttgcatttttctaccagctgagtgtctggtgatagctgggtgcaagaagattgtgagttatttatgcaggaggactgtttgtcctcgaccatgaagaaaggcagacttatagcttatctgcttcttctttttgctttcccctgctgccaccagcctgactcttttgccgttagaactccacaaacaggagttcctcttcaagccctctgtatccctcatccctccctcattcctttagttaagagcaaggtagggacctttacctggtacagctccgggagatgggagataagtgacactgagacttcatacccagaaccctcaacttcacaagaaacttctgctgggggccaaaagactcgggacagcagagctcaaagcagggccagaaggtgcaggtggagccacagcggcgggtctcctttaaggataagatggcatcatcataacagcactgctctgaagggttgtagatcttgttcccacacctgggtgtcggctggcacagccacagtcctgagccaacaggagcgtctgggggcagacattgatggtgtacatccaaggaagaacagatactcaattcccagtctcttttcccaacaccacctcttccctcctcatttttccctgtcctgtccttacctgtagttccttttgaacactggaggaggaagactgttatccagcagacaagagctaagggagaaaggaaaaaggttgaacatggagctgagaatgtgacaagtatggaaaaaacaaacaaacaaacaaacagaggttagggtggtttaaaggtggagattatcacttggggctaagtctgtatgggatcccgttcaggcaggccctgagcagcacgctcagtcaccctttgaggtgactagtagggcacaggaggctggaataatgttagagataaagaggaataaatcgggttgaggtttgggagctgcactgggaatgagatgagatgatgtttggatttggggtcctacttgcccaagatgcagcatcgtggcctcatgcttccaaagatgctctaggagaattgaagaagagtggtaaaaggctggaacttatggagacagcctaaatggggttgtctgttaacctggtaagtttactgattggatggctgctgatcatgccacctgcagtctcccaagcacattccttgaagataaccaaagtctcccaagcacattcattagtttctttaaggaggagactgggtggcgtaagggaccacagagccgaatgttgcagactgactcattgcattctccatatactattgcagacctcagggtgaatgagtgtaggttggtcctactccaagttaggcttctaagagttttcaagctccgacattgaggagacagtgcccaactaagctccaatcagagagaatgcttcagccacttccccatctggtttcacatcctccccttcctaatacttgcttcttctatattccccaagcacgatgtctctggaaatgtcaaggggaccgtttatgaagccactttattttttgctctggagtcattagagttgccacctgctctagcagttgagccacggctctggaaactccaataaagggggtaggggtggagaatagcaatggcccaaatctcctggtgtgcttggtgtgaggattcagagacctccagcatcttagttacatggtcagggaaagtactaaacacctgcttttcataatcatattatattagtggccaatgataagtgatgtagtacttaggagtgtgtagtacttaggtgtgcagacagagggaagggcagggcaaactgaggcctgccaggcaagtgccagctagggaagggcttggacaaattcaaataatcccgaagctgtggaaaggacctcagtcttcatggatgtgtgatgattcaatcagaaaatgtctaaggattggccagactttccatcctccacttgctggcacagcatagggaagagttgctgacttaagttcatccagcctgtaccatagcctttgaaatggttctccttttctgagcttcattcttagcttcctgtacatgtgcggaggtgtggggtgtggtttggatgcacaaggctgctctcccctaccccggaacctaagaaggccaacaatgtgaagattcctagtgagcccaggctgtcagcttgtttactaccaaatgttaaaaagaaacgtttgagtttgattaggtaaaatacaaaggacaaataataatatctttaatatacaattatcattcttattccaaatgaaacttcagctttactattgggcattgggaagttaatgtgtacttaatttttcatcttacagaagtggcaaggggcagcttgaagggataatttttaatgcattttataatgataatcatttagagaaatccttatgttgtatctcattaacactaagatgttattgaaagatacactgttgttttgcaactctaagatgcaatctcatcacttagaatgtttattaacagagcttcttgcaacatgttgagacgtagacttttggaaggcgaatagaaaaataaaaatatatgggaaataaatctgttaaagatttcttaaaatgtctccacatttggagactgcctcctgtgaatcatctttcaaccccagattggttcctgtgctttcttacacaacatcattctcagttctaccaacagcattggtcatgcaaagtttggttttattctaagctgctgacacccatactgcaagttatcattgaactggtgacactagccccttctttctttgaattttctttcatctattcctagagattttgacaactccttctgcctttcattatgttgttttccttgtgctaggcaatccttctgtgcctgtctcagaaacaaaatgtgatactcttcatctctttatcttcttgtgccccataaagcacttggttgttgatctgcaagaaaatatgtacttgggttcattcctaaaacaatgagcatgtgcttcattaacagtaaatttacgtcatcgtcttctattaatgtgtcattctgcacacacaacacacaagccaaatcatggtgttttctgatatttaaaatgacagttacactcaacacatgaaacataagcaatccacacaacttaattgaagtgtcaagaatattaacctgaagacttagttcgtccctgtacaactggcagcagctatgtcactctgcttgtctgatagctattgcaagaccctattgatgatacgatgcatcactagttcaagggtatgggaatgtagaatatatatgtacatctctgagtggaggagagtcattccaatttgaaacttagtatatttatgaggatcagatgaagacacacttgaaaagctcccagcacagtagctggagtgtgtcaagcttttcgtattttctctcctcaactgtgctttcttaagaaagctgcaaaatagtctgggcacagtggctgacacctgtaatcctggcactttgggaggctgaggtgggagaacagcttaaagccaggagttcaagaccagcctgggcaacaaagcgagaccctgtctgtaccagaaaacaaaaataaaattagttgggcatggtggtacatgcctgcagtcccagctactcggaaggctgtggtgagctgtgatggcaccactgtaatccagcctgggtgactgagtgagatgctgttgcaaagaaagaagaaggaaggaaggagagaaagagaataagaaagaaagaacaaaatatacacatcttgttccatgaactattgacaatttaggtcataggcaatcattcttagtctaaattttcttgaaggaagaaataactttctgtctggcactaagtttcaacataatttaggtcccggacaatttttgctgatttaatgaaaattatcaatcctcccagaaaattgttcttaaacggatgtataggtagataggtaagatgtataggtaggtaggtaggtgggtagataggtaggtaggtagatagatagatgatggatggatgggtggttggatattagatagatgttagattgatagacaacagacagactgcatgcaatttctttttttttagagtcactaattttacttttttaaaatgttaaaaaatctacttttaattttttcgtaagttattggggtacaggtggtatttggttacttgagcaaaggagccactggccacagaagtttctggttggtgaagcgacaccccaaggatcccataacactttgggaagtatggccatttttaacaatattgattcttcctatccatgagcatggaatgttttcccacttttttgtgtcatctctgatttgtttgagcattattttgtagttctccttgtagagatctttcacctccctggttagctatattcctaggtattttactctttttgtggcaattgtgaatgggaattgcagtcctgatttggctttactgttgttggtgtatgggaatgctagtgatttttgtacattgtacaaaaaatgtacatttgtacattgattttatatcctgcaacttcgctgaagttgcttatcagctgaaggagcttttgtggagactgtagggttttctagatacaggatcatgtcatctgcaaacagggatagtttgatgtactctctttttatttagatgccctttatttctttctcttgcttgattgctctggccaggacttcctatactatgttgaataggagcagtgaaagagggcatccttatcttgtaccagttttcaaggtgaattcttccagcttttgcccattctgtataatgttggctgtgagtttgtcacagatggctcttgttattttgaagtatatttcttcaatacctagtttattgagagtttttaacatgaagaggtgttgaatttttctcaaaagccttttctgcatctactgagataattatgtggtttttgtctttagttctgtttctgcaatgaatcacatttattgatttgcatatgttgaaccaaccttgcatcccaggaataaagcctgcttgatcatggtggattagcttttcatgtgctgctggattcagtttgccgggatttcttgaggattttttgcattgatgttcatcaaggatattggcctgaagctttcttttcttgttgtgtgtctgccaggttttgatatcaggatgatgctggcctcatagaataagttagggaggagtccctccttctcaattttttggaatactttcagtaggaatggtaccagctcttctttgtacatctggtagaattcaactgtgaatccatctggtcttggaaattttttggttggtaggctatttattgctgattcaatttcagaacttgttattggtctattcagggaccgaatctcttcctggtccaatcttgggagtgtatatgtccaaaaatatatcagtttcttgtagattttctggtttatgtgcatagaggtgttgataatattctctgatggttattatttctgtggggttagtgataatatccccctttacatttctaatggtatttattcggatcttccctcttcttttttaatctagctagtgttctatctattttattaatttttttcaaaaaaccaactcttggatttgttgatcttttgtgtgtgtgtgtgtgtgtgtgtgtgtgtgtgtgtgtgtgtgtgtctctgtctccttcagttcagttttgattttgattatttcttgtcttctgccggctttggggtttgtttgctctgggttctctagttcttttagttgtgatgttaggttgtgaagctgagttctgactctctgaagtgggcaattagtactataaatttccctcttactcctgccttagctgtgttccagagattctggtatattgtatctttgttctcattggtttcaaatagcttcttgatttctgcctcaatttcattatttaccccaaagtcattcaggggcaggttattcaatttccatgtaattgtatggttttgagcaaattccttagtcttgatttctaatttgattgtgctatggtctgagagagtggttgttatgatttcggttcttttgtgtttgctgaggagtgtttcgtgtctgattatgtggtcgatttttcaatgtgtgccatgtggtggtgagaagaatgtatattctattgcttttgtgtggagagttctgcagatgtctatcaggcccatttgatccagtgctgagttcaggtcctgaatatctttgttaattttctgacctgatgatctgtctaatactgtcagtgaggtattgaagtttcccactattattgtatggatgtctagatctctttgaaggtctcaaagagcttgctctctgaatctgggtgctcttgtgttgggtgcatatgtatttaggatagttaggccttcttgttgaattgaaccctttactattacataatacccttctttgtctttttttatctttgttggtttaaagtcatctgagattaggattgcaactcctgcttttttctgttttccatttgcttggtagattttcctccatccctttattttgagcctgtgggtgtaattgcatgtgagatggactgcatgcagtttcaagggttcaggttcactgtttatttaaaccaaatactacagggtatgatctcctgaactaagtgggtgaagtacacgtttcctatgaaacagcctttttcattatctcacagggcaataacttctttagagttttgataaatattttagttcccccagcaagcatcagatgatgagttaaagaacataccatgttatttaaaatatggcatttgtttgtctacatgctgtttattgaggttcttggaagcaccttttcattatgtttataaactggttacttgcaagtggttgcttgccagtttaaactagcttaagctgtggcaaaaagaggaatttattatctttggtaggttccaaattaaaaaataaagtgagcaagaactaagattagaagaaatttatgagcttggatgaaggttcccagtatttctcattatttttatgtttaatgatgtatagttccttttctgtaaatgatacactattcagaataattgttttgggttgtttgcttccttcttattaatttataaatgctctttttatatgggagatactaaccttttgtctgttatatgttttcctcgcctttgtgtttgtttctcagtaatgctggtggagtcttcttttttgagatattttaaatttttatgcagcagtgtcttttaccactgccctacatcttctttccactttttggcttccgcttacgtaaggaggccatctccaacttaaagttctatgaatagttctatatttttactttctttttagtcatttttattcacatataactttttctataagatgtgatgctgagtctaagttaattttcttgctaatgaatgtcctattgaatctgaaattacttgttgactagtttcatcccttttcttctaatgtacaatgttacttttcttatatctcagttttccattattagctttatctgttgatggactctgttcaattgatttatgtgtaatttttctaggtagtgtctggttcatttacagtagctttgttttaaattttaataatagacaaaaacttctctccttattacactacattaagctttactcgacaatatttgtgcagtcagctttaagagctcccaagtaattttctaaaccctcctcctaaaaaatagcaaaatttaaaaatgggaattcagatgaaatttttttgtaaacattgtttggctttggaaagcatgagcattctaatgttttaatactttctgtctcagaggtttatcgacttctttttttattaggtctagtttgctgtcaacacccatttaattttacgtaaacatgctcttcgaggctgaagcgaatatgactgattttcagtgtgaaaataaaacataaaaaccccttcttggctcatgcctgtaatcgcagcactttgggtggctgaagcaggcagatcacttgaggccaggagtttaagaccagcctggctaatatggtgaaaccctgtctctactaaaaatacaaaagttagccgggcatggtggcctatgcttgtagtctcagctactcgggaggctgaagtgggagagtcgcttgaacccaggaggtggaggttgcagtgagccaatattatgctactgcactccagcctggggagcagagcgagactccctctcaaacaacaacaacaaaaacaaaactgttcttggagttgtttctaaacagaacttgtctctagtattaacgtagcagaaatgtatatgattttacattagtattaaagataagaatattcttggccaacaggaaatgggttaaagccttgcagaggagggaaacagtgaattttgtcattcacttaaccagttttcacacacacacagagaaagtccagaagcctggctggtaagaaattcttacccttttgctggcatgctacggttttgggttctctttttctgagcaactttggtgaccttgctccctgtggcatagctgtgggggccaagccacgttacaaaagaaaatgatccctttccatttcatggaaccataggcaaaagtctctcctttttacaagaggccaaccagtgggttgcatgggaaaataagatattgaattaaatgcacagaaagaaaacaattcattgggacataagtgacacaaactttggttccacgtgctgtcagttctctccttaaaaagccagcacccaaagttgatagactcacacacccaaacagacagatgacagaaaagtccacaggcttcccctcctcacatggtgtggcaaagagaaagtgaagtggtgaggggttttgaatagagttacaggattgagggccagtatgacagagaaggggagagagaaggagaggaagagggagggaaaacgatagagggagagagggagggagagggagaggaaagaagaagaaagggaaggagggagaaagggagggagagggagaggaaagaagaagaaagggaaggagggagaaagggagggagggatggatagaattgtttcttgggactggaacccaaaccaacttaggccagggaaaaggtacactctgtcccactgcctgctgagttgatcagatccaggtagtcaacgatttcaacctgtccctcacagatatctgttcacgtgacccaaaccactaaggattaggagaggagagacaaggcaccctaagtgacagaaaagttaggaagtgaaaaggagagaaagcaagaagggaagggagaaaagcattgcctgcaggagggatgggggaggcaaggagggctggcaggctggagaaagactcaaccagcttggcgacactgaatcagaagttcaggcagctgcttgtcagccgtgaagggatcttgtccagcagtcccatcagctcacaagtctccccctcagggagagaaaggctccccacatcccattgttgggaatgggtgctcggtgtcacaaaaatcaacactgagacaaaggatctctcagcaaggctagtttactttctgcagaaagagggccgcttgctagcagtcttgccatgagagcacacacgaacaaaggagacagggtcatttataacctgatatgccaccctactgctgtgtctggcttccgttggctggaatgggacctcacattctgtacttgacctgattggctagcaacttagaacttccccaaagaggcaaaggcagaggagaacaaaggaagacaggaagtaacttgtggaatgctgagagaggcaaaagcacttccaaataaggaagaggaataggctatgacctaatgcttgcttgggcctgttcaggcatgccagggcaaatatctaggctaaaatgcggtagctaagaacgcagagtatattgatttctttattatggctagcagatatttaagaatattagcacaggtctttgagtaaattttgcttctaagagaggttactatctattctcaattagactgggaggaaagtccctctgaagaggaacctctacttattttattttctacaccatgatcccaggcaagcccctaaataatacattactggtcttgggttcttgggctctcaatgcaatagaaactgacatgaggtcaaaatagttttcccagacaaaacttcattggagattattcctggaaataagagaggcagcacaaaagagaaagaattccctgatgactccctgaaaagagctggtagggctttttttattaggcaaagtgtgggaattgacatcaggggtagggtatgcaggctgggctgggcaaagcaggagaggtatacggtatgcaggtcagcagtatctgcttaggatggttttcttgaggaagagaccacctggtggtctggcctgtggcagcaaggctgtgaatcagttgttcaacattctttctggaatcttggttgtctcctaagaccagttcttgggattctttaagtaaaaggactattagcaatgaggtagtggcgtgggttttgtgatcagcaggaatgttgtagtacagcagtccctaacctttttggctccagggactggtttcccaaggaagacagtttttccatggacaaaggaggagggggatagtttcaggatgattcaagcacattacattaattgtggactttatgtctattattgttacattgtaatatataatgaaataatatacattatatattacatatgcaactcaccatactgtagaatcagtgggagccctgagcttgttcttctgcagctagatggtctcatctgggagtgacaggagacagtgacagatcatcagacattagattctcatattagataaggagtattagattagataaggagtgtgcaacctaaatacttcacatgcacagttcacaatagggttcatgctcttatgagaatctaatgctcctactgatctgacaggaggctatgcttaggcaataaggtgagtgatggggagcagctgtaaatacagatgaagctccacccactaagtcactgcttactgcctgctatgcagcccagttcctaaaagcagacacactggtaccagtccatggcctgtgggttggggacccctgctctagtaggggtgagatgaagccaagccctgactcttctctgtctcaaggagagccctaggtgcataatactgagaagaggagcagctctgtaattgcagttttaggcacaaggaagcatcattgggcatcctgattatctctttaatgaatattcactgtcactatcttgataatatctgtaggtatcatttacaaaattttcttaactactatcttgaaataattttaaacttacaaaaaagttgtacagttggtttctttctttcacacagattctcataatgttaacatcttaaatgatcttaatacaattattgaaagcaagaaatgaatattgactaacactattaatgaatctacaggctttattttaattttatcagttgtcccctcatgtccacttcctgctccaggatccaatccagaatcccacattgcttttgatgatcatgtctcctttgtgccctcccaactgggatagtgctttgtgttttcttagagtctgtatttctctatttggtatccattaactacagggtttaactcatggtcagagttgtttgcatctcccccgagagccagaacccctgctctgaaccatccgaaccatcccctttagtgtaggggagagaagagggttagataaaaggtttcagtcacttcctacaggaacctcactgaagtaggacacaagttcgtgagacctttgatctgaggtccttcagtgagggaggtaggacctcactgatgcaagaaacatgctggaggaatagcaagttgacctccattccagtcttctgtggctgtgtagatctagaactaatttccacctcaaagggaagactttcctggacaggcttgcagccctgagtggaaacatcccactgcctttgactcctgactccgtatctcttttccagtaacagttgtgtaaatgtttattagctgacaattatctaacaattcttggcttccagacttcacccatgtcaacatttttcaaagtgtggcagcaaacactttcttttctttaaggattctgaatacaggccctcagtcttttctggcttgtagggtttctgttgaaaggtccactgttagcctaatgggattccctttccaggagaccttcccctactttctagctgcatttaatattttttctttatattgaccttggagaatctgatgactgtgtcttggggatggtcctcatgtatagtatctcagaggagttatctgaatttcccagatttggatgtcaacctctctagcaaagttggggaaagtttcatggacagcatcctcaaatgtgttttccaggttgcttgccctctctccctctccttcagggatgccaatatgtggtaggtttggtctctttatatagtcccagatttcttggtggtttcattctttttttaagaaaatattatgtcatgaaaaaactcatcaattaactagattcatacttgtttgaacaagaattgaaaatctattaaataggcagaatgtgggcatcttgttccacatgggaatgaaaagatgctataggttctttaagaattgcacagtgtaaaaaaataacaagaaaggagaaggaaaggggaaaaaatcacatgatattgggagccatctcacattatgaataatctaccaataaacatgtaaaaaataatactctttgtttctgcagtagctttgagtttatagttcttggaatgactgtattccattgaagacatctcagtaacaggaggctgttttagcaatcccatgtgcagatattaataaaaaaatatataaaataatgcaattcatctcttgccatcaccccagaaatcatgacatttctgagaactgttttgcttgaaaatgggttaagctgtaagtttcggctgaagctctgtctctccaacccgtttgagtgcaacattcactagaagctgaaatccactaaagtcctggttgagatccattggagtagggggaggagtgttgaaaagactactctgtgtattggtacttggtctagatttacacatgtcctctgggcacatgagagaggtgtctgtaaagttgttggctgctacctgctgtatatctgtgttttgtcccacaccaactgactggcagagaaagggacatctttcaatgcagtcacagtggcatggcagatcactgatggacgagccaaaactgatcctggggaagacggcttaggagacaatggcctccctagggttgggtttggcccagatgtacaggaatgaaatggggtctcctctagagctggcatgaagtttttgatgcccatcacaaacttcacagagcttgtttcagaaatcttgggcccacggcaggtaattgtgaactgatttggatctttgccatcctttctcagcatgtcaggatgcgtacaccacatgcaatattatctccttcgtaggctcatttatctgagaagcttgtggcgggcgttgatgaaccagttacagacctgtagtgtagacagatatgtttgctgggacaacagtgctttttcttgctcggaaggatggacattgtaatggtgctcatacagccaatcttgaagaatctgcacagactccttgggcaggttgccccttctccttctcttgcctgagccagaggatgaaggaaggtccaagggaatgtccatggaatcgtcatcctccgtctcactgccagatgctgcaacaatacctttcattgtttccatgagtcagtgcagaggagcaggaccctgcgtgacccaggatggggacacctatgcggccagtgtggcccagccttggtccccggcttcagggagagggttttcttcattttaaaaaatgcttttttaaatttttgtctgactgagttgattcaaagaaccagtctttgagctctgagatcctttcctcagcttggtctattctgttgtgaatacttctgattatattatgaagttcttgtagtcagtttttcacctctgtgagatctatttggtcctttcttaaaatggctgtttactctttaagctcttgaatcattttagtagattctttagataacttggattgagttttgactttctacttaaatcttgactatcttcattgccatgcagcttctgaattctgtctgttatttcagccatttcggtctggttaagaaccattgctgggaagctagtgcagtcatttggcggtgagaagacactctggcttttagagttgccagagttcttgtgctggttttttctcatctgtgtgggctgaagttgctttaatctttgaagttgctgtcctttggatggggcttttgggttttacattctttgatgcccttgagggtttaactatggtataagttgggtttagtcaactggtttcatttctggatgatttcatggggccaaggctcagctcagcacttctgggctgcatcgtctaaccctggggagctggtaccaggcccatggctttgtcccctggatcttcagggttaaacacctactgcactagaggggctaaggtgttccccatttgctagcaacaacactccaacgtggggtgttgacaaaagtgcttcatctgggtcacagcagtgggatcttcactcacacatgtgctggtggtgggggagcattgatgtctgtgtgcatgtgcatgctggcaaagtgttgaggggaggctgtgggtgagtgcttgctggcaaagtggtgagaggaggctttggctgggtgcatcctggtgggacctgtctgcaaaggctctctgatagttggacagggtctactggtgaaagggctaaggcagtggcccctgggaagcaccttagtttggcaactgaggctttgctgcaaacagatgtggcgggtagggaacttgggagaggccagcacactgagaggcactcgtatcagactggccccatctcctaggcaagatagtcctattctgtccaggtctgacagtcaagaaaggccaaagccacctagaggagcaaggtgagccttggagaatgagcatccctgtccatgctccactgcagctgtttccaaaccagactctctgggctctacacaggctagagtcctgtccctgccaactctccaagcagctctctctgccagcgcaaatgtccatgggggctgtgggaccttttgcagctaggattctggaggtctctggcaagagtgggccactccatgcctatttaactccccacttccccaggagctgttcagggccaggaacaagtcctcatgctcagcaaccctgtgcagggtttccagcttcctccccttgcagctgagggcctgcctccctcactccactctcaatgccttcctttcgaagatctgcttggtgtatgctggtcttcttgatggtcagtcccttggtgggagaagctcttcctggctgcatctagttggccatctcagctcctctccccaatcaaaaccaattttttttttttaaaaacgaaatcattcaaattgaattctaagattttaaggctgaatttaagaaagaacctctatgcacatgtaagaaatctatgttacatatgaggttccagaaatgttaaaaattagtatgtagaaaagatacatcatgcaaacactagcaaaagaaaattactgtagctaagtgaataccaaggtaggctttaatgcaaaagataaagctagagataaagcaggacaagtaataatgacacagggatcaatccaaatggaacatataataattatgaatctgaatatacctaattacttagcttgaaaaaagtaactaaaataaaagtggaaataagcaagttcacaactgtggtgaaagactttaatacactttttgggatagcttatgtaataaggagaacaaaaaatcagaatgggctaaaaatttgaacaatacaactaacacacataaccaaacttatatgtgtatatgtctatatatatttatatgtgtgtatgtatttatatgtgtgtatatatttatatgtgtatatgtatatatgtatatatagtatgagatacacatatatttcacgcactcacacacacacacacacatatatattttgagacggagtttcattcttgttgcccaggctggagtgcagtgacatgatctcagctcattgcaacctccacctcctgggttcaaacgattctcctgcctcagcctcctgagtagctgggattacaggtgtgcaccaccatgctgggccaatttttgtatttttggtagagacggggtttcaccacgttggccaggttggtcttgaactgacctcaggtgatccacacacctcagcctccgaagtgctggaattacaagcatgagccaccacgcccagcctatatatatatatatatatatatctcaaaatggtagaacttacatgtttttcaagtctacatagaacatttatgctaaattgatcatatgttaggtcataaagaaagtctcagcttccagaggatgaacgttattaaaagtaggtttttgagctgggcacagcggcacatgcctgtaatcccaaatactcaggaggctaaggtgggaggatcacttgagccaaagagttcaagtctaacgtaggcaacatagcgagacctcatctctgaagaaaatgttctctgggactcccagtttctagtcaagcatgtaagaggcttggaactcatcgctccatcttaacagaaaaaatactgaacaaagtaaaaaattaacaactcttagataagtgggatcacagagcaaactactaccctacgatttgttgacaggcagttggatacagagaatcaaaactactgcaacagaaacccatgaccagaaacccctgtgggaaccagtaccaggacaggaaaacatgaagtctaatgaatgaattcctggaggctcagggtggagcagtctgagagttaaaaactccagggggcccagtctaaggggagcctctgcacttttctaagagttttacctccaggaaccctatcaggttctcacagtgaatatgggagaaaaatctccttcatggtctggcatgaagtgggaagggggaaagtaaccgctgtgaaacacaccagagtattctgttcttcttaacaagctctgccattaagagaaagcattttaccagaatctaaattattagggttttatcagagcctaagtgacctggaggaagagagtattatttttatacaggacagtaaacaagtattctttgctctaaagggaaaccttacctctatcttccaaggcagttcactacacaaacatccttgaaaagagtgtggaacaaaagaacagtcaatgcctcactgccaggccagcaaaaatgcaagagatccatgggaaattgtctctgacaccaacaaaccaatatttttgcaaagtaaataaacacatgagcaaggtgataatagtgtgccggaaaacgctgccctgctgcagtggtgactgtgatagtcccgggtgtctgggaagacacgccaggatcacagagtggggcctggttttagaagaatgcaaatctggtcatgagtttcactgcttaaaattattgaacgactccccaccatgtctaggatggaacccaggctcccagctcatcccacaaggcccttcactacctgggcctgcctttccctctagcaccttctccacctacacccatggtggccctctgtcatccagctgaacagccactcctagaaacacccaaaacaggcttcaacaacatgactcacctaccagcacctgcttgaagccctcctcacagtaactcttagttcccttcagggtttctccttctccccatcttcccaccctgcttccaacttccctcactgatagagaattaagcactcactctatgcatcccacaggactcatgcttacctctgtcactgtcttgccattggtcagtctcctgggtatttgcccaacccgaattcaccctaaattatcaaagatatgcatgcaaagaacaaaacttctgtttttgaaagttacaaataaagtatccttctcctccttttacctcacccctcccttgctcatttgctctcctcagagatcagtgctgttagcagattctggcttcagtacctttgaagtttccaataatactctcataattctctctcatgactttagggacccaggtacaccattaccagttgtggaattctaaaaatttacttaacctctctgagctacagtttcctctttaagcacaatgaaataatgacttacaagcatccaataacataaatgtgtgtataaagttcatgtaaactgggaccccacacacaccccttatcatgccaagtgaatccatcttgggaagtatgttggatggaaaattttcagaatgtagaaacttgcattctattattttaagtgacaaaaataataatgttcctagcccagttaataccaccaggtaatttcctcaaacattacaaaaatactcttaaaaagctttctagcagtctatccagggtttctacgtgaaatatagcattgagaagagttattctttgttaacatttactcactggtgagtatgggtatctgaagtaagaaatacgttgcgtaatatctgaatcaaattatctattccttctgcaatgaaaaaacaatgcactgtgatgtaatataaatatacaagtatgttatctatctatgtttaaattattatatgaaagagactatttaaattggactttagtaggcagcacgactggtggctgacagatattattactgggacccatgctgggtgaaaccctctggaaaatggtagggaagatgagagatactgctctgtatgtacagacaagcccagagagctgctgacattggctaattgcactctgcatccttttgcgtgtacttctgccaatttaaaagcttccactggcttctacatgcacattataacagcttttgatacagataatctcatttagcttatcactgtcaagccttcacagcaaatattgttatagtgtaagtttatatagtgaagaatacctgtacattacaaaatgagagaaaatttcatttaactcctataaatgcactggctctgtgaggttgctgggtggaaatgcaggggttgactgttacatgttactgcaattgatgtttgaacaacacaggcttgaactatgcaggtccatttgtattttcttccacctctgccacccctgagacagcaagaccaatgcttcttcttcctcatcaccctcatcagtgtgaagacaaggatgaagacctttatgatgatccacttccactgaacacatagtaaatatattttctctttctcgtgattcttaataacgtgttcttttctctattttactttattgtaagaatgtagtgtataacacatagaatatacaaactatgtattaatttactgtttatgttatcagtaaggctgcccatcaacagtaggctatttgtagttacgttttttgttttcttcttcttctttttttttttttttgagacaagagtctcactctgttacctaggatggagtgcagtggtgcaatcatggctcgctccagccttgaattcctgggctcaagcaatcctcctgcttcagcctcccaaagtactgggactataggtgtgagccaccaggcccagccagtagttacattttcaggaaatcaaaaattacatgcagattttcaactgcccaagggtgtcagcaccccaatccacacattgttcaagagtcaactgtattatcagatggtattgttggtaataacaatagctcacatttataaaccccttcccatttgccaggcactatagatattgtctctgctcaaaccccctccaagggcttccctgtggctcagagaaaatcaagattgtgcacagtggcctactgagctatataaacaggcccttggtctactgtgacccatcacttgccacttcacattccctcactcagacccaacacgtggcctctgttatttgttgaatgccccatgcaggcaaccccaactggggctacagccttaggggattcttccagtaacctgtgggcccacctctcacctctgtcaggcctctgctcagaaaataactcatcacagaggccttccctgaccaccttcacttagcattgtttacagcagcggttggcatactttttatgtaaagagtcaggctttgcaaaacataagtctcttctgcaaccactcagttctgccattgtagtgaagaagcatgaagacaatacatgaatgaatgagtgaatatggctgtgttccagtaaaaccttatttatggatactgaaatgccaacttcatataattcatataatttcatatattttaaatgtgtcatgaaatgttactcctcttttgatctttttgaccattgatacaacacaattattcttagcttctggcagtcgaccctcaagtcatgacttgctgatacctgtccacgtaattctctatctcctaaactcctttgttattttttccatggcatacatcattggttgatatcgtatcatatcgtatcatatcataccatatctcatatcatatcatatcaaatatacttactcgatgtttattttctgtgtcttctaaacaaaattaaaccccttattttgctcactgctatattctttgcagctagaacagcacttagtataaaatatgtattcaaaattatttctgaataaataagtgaatacaaaggtcagtttccacaccctgattttattttatttaaaaacatacagtaagttgactgttttctatgcacaacttaatggatttaaacacaggtatagattcatgtagtcacgatcaaaatcaggttacagaacagttccatcaccccaaacccaaccccaacccctggcattcactctttcctatagttttgcctttcctgagtgtcacaggaaaggctaagttgattcttacctatgtaattgttgagaccaacttcttgtatctgacacggtgcctttgagatcttgccaagtcatggtgtatgtaaatagttccttgtctttttattgctcaaaagtttccattgtgtgtgtgtaccacggtgtgtctcccatttcccctgttgatagatatttgagttgtttccacttttttgctattacaagtaaaatactatgaacgattgtgcttttttggtgggaacataagtttcatttctctgggataaatacacaggagtgtgaatgatgggttgtatggtaaatgtataattttataaaaacagccaaaatgtttttcggggttatatatatataccattttcatttccatcagtaaaatatgagaaattcagtgtctttacttgcttgttagcacttggtattgtcgatattctctctctctctctttcatatatgtttgtgtataatttcataatatctaaatacacatactccggcactttttcacttacacccccagtggccctccctcgtccagtccaacacagtcaatccttgcaacaccccaaacaggtttccacacgtgacttacctaccagtgagtgacccactcaccagattaaagccctccttccagtaactcttagttcctttcagggtttcttctctccaccttcccatcttgcttccagcttccctcactggtagagaattaaggacacactcatatatatgtgtgtgtgtgtgtgtgtgtgtgtgtgtgtgtgtatttatttatttatttatttaatatatatatttaaattttgccaattctagtagatgggagatagtatctcactggttttaatttgtagttccagtatggctaatggtgttgaacaacttttcatgtgcttatttgctatctgtatgtcctcttttgtaaagcatctgttcagatattttgccgatgcttaatgattttgtttgttgtttcactttgagttttgagagtttttcatatactctggattcaagtcctatgttagagatgtgattcacagacactttctgcagttggtagcctgtctgttgcttcacttaacaatttgttcatcaagtttaactttaaaattttgataagtccaatctgtttttaaaaaatggataatgcttttgatgtcttttcccagatataaatgttttctctgatgccttctccttgaaatacgtagttttacttttcatatctagaccatttggagttaacttttgtatagagtgtgagctttggtagaagtcttctttttttttttcatatgcatgcccattgtctcacaccatttgttgaaatgactatcttttcccccattgaattgcctttacatctttgccaaaagacaatttactatatttgtttgggtttatttctggaacctattctgttcctttgatctatgtgtctatccatgtctatccatttgccaatactacactgttgtcattactgtagcttgagtaattgtgaaattggatagtgtgagtcctctaccatctttcctcatccaaaattgtgttggccattctagtttccattgcttttctatataaattctagagttattttgtttctctctcagacaaatcctgcttgggtttgattggaattgtgttaaatctgtagataatttggaaagaattggcatcttacctaaattacagattccaaaccacgacatgatataccactctgtatttaaggtttccttgaatactttaatcgtacacatcctttatatgttctcctagatttacagtataccagttcagtttttggggaggggggtattgtaaatggcattttttttctttaaattattgtatccactagttcttgccagtataaaggaatacaattgacttctgtgtgtttcatacgctacaacctttctaaattcacttatcaggtccagaactcttctactaacaatgcacttttataaagccctaacacctctcctgatctctgtctcaccctcccacctatctcactgtgggatgggaaggaagtcaatggaaaacacaggagcgcattctaataatagcccacatggtatccagtgacacaaataatagtgatggtgacaataaaataacagtaagaaacacagaaggagcgtttccttggacaaagcactccagaaacaacaacaaaaaggggctgcctttccatctattctatgaatcccagatgtctattttatcactgtctgttccttttctgttctccctggcagggtttttacagcccctgctctttttctagattatgctgcatcttcacagtttcccctaaatgactctgaagaattatagacagtgctgtctacaattataataatggatatggtggtccatttccaagacaaagtacctcagataggctgaggcccacaaactatggaaggacagaatatactaggcccatagctggtgcatgcttgtcggggtccccttagttaccctctcccaaaccagagtttagtctagaatgaaagtttactagccagcaaaatagctcactttatctattcttatcagcttgcctgactgcctaggtcataagtcaaatacttgaaaagccctcgagctggctttgattgcaatgtattataggctgcaacaaaatgcagtgagacaatcctaaagaaaacacctaaaagcctcaacccagcaaccaataggcgacgtctgggaagatcgtgaccccatcgtacttagcctacgaggaaccaggggagagacttgtgcactaggggataaatagcttgttgtaaccgtactgggtgtgcctgcctaccagacattcaatcttgcaagaccatcattaaaagtcttgcttccactgttttctgtgtctctgagtccattctttgggtttggacgggtgcgtttgtttctcatagtgcaggtctggagccggactgagatggggagtagagggaccccttgaaacttcagggtggatgaatatgaagtttcatcaccagctgtgatgtttggtgagtagtatgctctcagataagtgagagccaaggaatctctttcaagtctctttgccgtgggcagagttcaaagaatgacactcactcacggctttgaaaggttctagggaagcctttactctgagatttcgagaggtctgagaaggtagcagtcacttggaacaggtccaggaacatcttactaagctgttgatgcagttttttcttatgctttctgtggcttctcatgccccaccctttccaagaggccagtgcttctgggcacctccctaaatgtggataagttcatagcctacataagtccctgtataaagtcactgacccatttgcactgctgctgtcccatcagctgctctgaagctccatggtgcccagaatcttcggtaaggtaacccttgccccaggttgagctaatgcctactgttatccctaatgtacctctgaacctcaaacttaattctctcttccctatttaattcttggtttcccacctcataatcacccgtgtcctctctgactgcattgcaatctctcttccccacctgcaaattccagaagcttaaccctttccagagccctccctgcatttcctcacctgccaagcccaatgcccagaacctgcacacagagtcagtcccaaaatctgctctgagctgttacagcaaccaaagaaactcagagacatcatcttgtgccccatgatcatgatctggtgaccccagaatcactgtcattcttctctcagctgatctttatttttgaactcctgggctcagactcagaagggaccataggtgagaatgggtgtggtgagtggagggagaagaaaggagggaggattatagcactgtggatagggttgggggctcccagaggtcccctgccagctcatcagctctgactcttccagatattggactgtggttgtgccagttgacactcaggagtggagactagatctgcaatctgttgggactgtgatgaggggatcatcctgccctcgaaccagacccagccctgtagcccaggcactattgcctggagttcctgggctctcagcgccaggaaatcatgaggttcagtgtctcaggcatgaggaccgactaccccaggagtgtgctgggtaagtaagggcagcccaggcagtggactgagttttgttgtgtgtattccatcaagatgagcaatgcctgctgtgttcactaacttctttttgggcaaccatctctctctctccctctctctcttctctctctctctcttctctctctctttctctctccctctctttctctctccctctcttttctctctctcccttttctctctctctctctttctctttcccactcacccctcaccctttccacctctccccctcttcccctctccccctccccctcccctccccatctccctgtgtccctctgtctcacatccccctctcttctcttcccctctcccctccctgtcttttccctcctctccttccttctcttccttcctctctcaagttgaaggaagagtagctcagtcatcttccagaattgctttttacctccgagtcacctggctccatagcccccgaccaccgcatgcccatttagctgttcctctctttcccctctaccctcacccttggcaaccaccagtcagctttctgtctctatggatttacctatctgggacatttcatataaatggaatcacaccatttataagtgacctttcgtgtaactttttttttaacttaatgttttcaaggcatatccccattatagaatttattagtacttcattcctttttacaactgaataaattcaattgtatccatgtatcagcattcatttatccattcatctgttgatggacacttgggctgtttccaccatttggctattgtgaatagtgctgttacaaacatatgtatacatgtatttgcttgagaacctgttttcagttatcttgggtgtacacataggagtggaattgctacgccacatggtaattctgtttaactttttgaggaattggcaaactgttttccacagagctgcatcaattacattcccaccagcagtgtatgagggctcacatttctctccagattcttcaacctttgttattttctattttcctgtttattacagtcatctgggtgggtgggtgtgatatcctgtgtagttttaatttgcgtttccttggtaaataacaatgctgagtgtcttttccatgtgcttattggccatttgtattcctttttgagaaaaggtttattcagatttttccatgtttaaattgggttatttattttattattatttagttgtaagagttttagaagatatgctggatactcatcccttatcatatatataatttgcaaatactttcctcattatgtggattgtgttcatttccttgatgctattgcttgcagtgcataggtttttaatttttgatgaagtctattctttcttttctctcttgtgcttttggtgtaatatctaagaaaatattacctaactcgaggtcattaagacttacttgtatgttttctgctaggaatctttttaagaagttgacaaagaataattgtgtatatttatggggtaaaatatgatgatttaatgtatgtttgccttgttaaatgataaatcaaattaattaccatatctaccacctaatatacttattactttttgtcactagaacatttaaaatatactcttcagcaattttgaaatatacaacacaccatttgtttttttaagaggcagggtctcactctgatgcccagtctggagtgcagtggtgtgatcacagctcactgcaccctctacctctgaggctcaagtgatccttccacctcagctcccaagtagctgagaccacaggcacgcaccaccacaccatgctaattttgtttttcatagagacgatgtctcactgtgttgcccaggccggtctccaacttgtaggctcaagcaaccctcctccttggcctcccaaagtgctgggattgcaggtatgagccatcacgtccagcccacaatacactattatttattatagtcaccgtgccctgcagtggatctctaaaacctatctttcctgtctaactgtaacttcatatcatttgcttatctccctgttgcccatctgcccacaccaatcctctggtaactgcccttctctctacttctatgagttcaactcttttagattctacatacaagtgagatggtgtggtatttgtctttctgtgggttgcttattttacatttctgctaagagttttatatgttcgctcttgtatttaggtctgtgatacattttgagttaatccttgtgtatggtatgaggaagagatcctctttctgcccactcttttgtgtatgaatatacagttttcccagcaccatttgttgaaaaatcatttgttcccttacttcatagtcctagcacttttgttgaaatttgatttcaacaaatctaagggtttattttctgactgttagttttattcattgatctatatgtctatcctgtgtgtcagctcctacactgtcactatagctttgtggtaagctttgaaatcatgaagtatcaattctacaattttgttctttttcaagatcgttttagttattctcggtcctttatgtttcaatatgagttttaggatcaactgattaatttcttcagagaaggctgggtcctgtggctcatgcctgtaatcccagcacttttggaggccaaggaaggtggatggcttgatctcaggcgttaagagaccagcctgggccatatggtgagaccacatctctaccaaaaaatgcaaaaaattagccaggcatgcggtgtgcgtctgtagtcccagctacttgggaggctgaggtgggaggatcacttaagcctgtgaggcggaggttgcagtgagtcatgatcacgccactgcactccagcctgggtgacagagtgacacttgatctcacaaaagttctttgatatggattgcattgattctatagatcaatttgggatttttggcacctgaacaatattaagtcttccaatttgcgaacatggatgtatttccatttatttacatattcttaattcttttcaacaatgttttgttgtttttaatgcacaaatcttgcacctcttctgttcaatttattcataagtattttattctctttggtacgtggaattatattcctaatttcatatttagatggttttttactagtgtatacaattgctttttatatgttgatctcttttatcttacaatcctgttgaatttttctattagtctttaggtcatagtagcttccttaggtttttttttttttttctttttcttttttgagacagaatctcactctatcatgcagggtggcgtgcagtggtgtgatcatagctcaatgcagcttcgaactcctgggctcaagtaatcctcctgcctcagcttcctgagcagctagaactacaggcatgtgccaccatccctggctaatttttttatgtttttatttttatacagatggggtctcgctatgttgaccaagctggtttcaaacttctgacctcaagtgatcctccccacttggtctcccaaaatgctgggattacaggagtgagccactgtgcctagtccttaggatttttaacatacaaaatcatgtcatttgcaaatagaaatcattttactttatctttctcagtctaaattcattttatcttcttgcctaactttcatggcttgaaccgccaatgctatcttgaatagagtggtaagagtggatatacttgtcttgtccctgatattagggggaaagtattcaatctttcacaattaagtatgatgttagctatgagtttattgtagatgctctttaacaggttgaggaaactctcttctattcctagtttgttctttgtattttatcatgaaagagtgtagattttgtcaaatgctctttcagtatcatttgagagaattacgtgtctccctcctatagtctagtaaggtggtgtattatattaattgattttcatatgttgaaccaactttgcatccgtgggataaatccacttggtcatggcgtatcgttctttatatatgctgctggatttggtttgctatgttttgttgaggatttttgaacttatattcataagagatgttggtctgtagttttttttccttgtgatgtctttgtctggtttcggtatcagggtaatacaggcctcagaatagactggaaagttgtgtttggtttttttgaaaagtttgtgaatgattggtattaagccttctttaattgttttgtaaaattcaccatctgggtctggatgggcatttcccgtgtatgggtattcccctttctctgcatccttgccagcatctgttatttcttgtctttttgataaaagccattttaactgagatgaggtatcttattgtggttttgatttgcatttccctaatgtaagtaatgttgaacattttttcatatacttttttcatatacttgagtgtttgtatgtcttcttttgagaactaggtattcagatcttttgccccttttaaaatcagattctttatttttcccagcaatacaattatgtacatattgttttatgccattacttttaagaccagttaagagaagaaaggataagaaataagcaattatactgttttaataagtagttacaagttatataattgcttatataattacacaattctattttattagtgctctccagagggtgcagccttgggcatgagtgctggatcgctaactactccagataattatggttttagctgggttctttttttggggtagcttttgcctttttattacaaattatatatgtgtatatatatatatatatatatattttttttactttaagttctgggattcatgtgctgaacatgcaggtttgttacatgtgccatggtggtttgtttcacctatcaacccgtcatctaggttttaagccccgcatgcattaggtatttgtcctaatgtgctgcttcccttttcccccaagaccctgacaggcccctgggtgtgatgttcccctccctgtgtccatgtgttctcacagttcaactctcacttctgagtgagaacatgtgttgtttggttttctgttcctgtgttagtttgctgaggatgatggtttccagcttcatccatgtccctgcaaaggacaggaactcattctttttttactattttttcctgatgtttctgttaagcttctggcccgtctgcctctgttggtatcacttgcatctgttagactcctctaattgttaattgattgctcttttctttttaataggcctgtgggctgcttaatgtctaacccttttgccaagacaaagtgttgccagggtttgaggctgtctctgaccccaggaggagggcccttcttagttatctctttttctgattttctctgttaagcttctgcctggatttttgggttttgttttgttttgttttgtttttgacggagtctcgctctgtcgcccaggctggagtgcagtggcgcgatctcagctcactgcaagctctgcctcctgggttcacgccattctcctgcctcagcctcccaagtagctggaactacaggcacccaccaccacgcctggctaatttttttgtattttttttttagtagagacggggtttcactgtgcttgccaggatggtctggatctcctgacctcgtcatctgcccgcctcagcctcccaaagtgctgggattacaggcgtgagccactgcgcccagctggtctttttgtttcttgttactactgtcatggaattaccaccctcttcttggttttttagcaccagaatttcagatatttttgtacggtgttcttaggcatgaacttctccacactcttttcaagaaaagccagttttagggagacttgtggagctctctgttctgatggcctccctctcccccgggcagaaccgctgagccactggactggagctggtgtcagggacagcagctagcttctcctgcagcgatgtctttcctctacagctagaacactgggagggggtggtagctgctcctcttctcggtttgccctttcttgtgtggaacctctgccccatgagtgaactcaggcaggatcagtgaagcccagtgtgcttcacctgctaaacttggcatggaacttccatgctaggaggaggggctggatgggagaaggagccccggtgctgtaagccacaatttctaactaatatagcacatccgcaacatggagacagtaggataaaagatgctggtgcactgccctttctgaactgaaactgtagccctaggctgggagctggggagaggtggagtcccattttcttgtccgtgactacccagcatagagcttcaattacacagagttggctggggatgtggggaatagggataatttgtggcttaaatgccctcagactctcgctgctctatacagattgagtggaatttcttgaataaacatttctttatttgctgtatgcccttaggacaatttcctgagacttaactagttgtttttataaaaaaaataattttcatcagttaaatggttgttttgccgggaggaaggcacccatgctcttcacactgacttctggaagtcctgctttatagtttgaaatattttgcatttaagtctatgatccatttcaaattaattttcacattttgtgtgagataagggtcaagatacattcccccccaatatagatatctattaaaaggactaatctttgcctggtgagttgtagtggtacaattgtgataaatcactgattgtctgtgtgtggatctgtatctgaactctgtttcattccattgataaaattatttatctttcgcaataccacgctctaaattattatagttttatgaaacttcctgatctgttagggtaagtcgtataactttgtttagtttcttcaatattgtattggctatcttgtcattttcattttctggtaatttttaaaaaaaatatgtatagagtcagggtgtcactgtgttgcccaggctggtcttgaactcctgggatcaagcaatcctcttgcctcagcctcccaaagtgctaggattacaggtgtgagccaccgtgcccaaccatcactttctgataaattttagaatcactttgttaacttatacaaaaccttgctgtaatatttattgagtttgcattgaatttatcgatcaatttggggaacactgacatctttgttatattgagtcttccaaagcataaacctggtatgtttcccatttacttaggtgttctttagtatctttcagcagagttttgcagaggtttctcacctttctttagatttaattctaggtatttgttatttttgatatcattgtaaatggtaatggagaattggcttctatctagagccgtaaaacaaacctcaacaagttctaaagtattgaagtttaacagagtaagttgtctgaccataatttgatcaagctaatgactacagaaagatctccaagcacttggcagctaagcaacacaactctaaataactcatggtttaaagatgagtctcaaagatttttaaaactatatttaacttaatgaaatgaaaatacaatatatcaaaatttatggaacatatataaagcagtgctaagtgtgaaacttattgtgctaaatagttgtattagaaaaaaggaaaaatcaataatctaagctcccacatcaagaagctaggaaaaaataaaagagcaaaataaacccaaagcaagaaggaaggaaataataaagaggagagcaggagtcgataaaattgaaaacagaaaaacagtctagaaaatcaatgaaataaagagttaattctttgaaaagatcaataatcttttgatagttttagcaaaactctcaaaaattcaaagagaagacacaaattgtcagtatcaggaatgagacaggagatataggttttgcagacactaaaagaataatagtggaaaactaggaataactctacacaatttgacaacttagatgaaatggaccacccatttaaaagcacaaatgatcacaacacacccaatatgaaatacatcattttagtagccttataactattaaggaaatagaattcagaatttaaaatatctcctaaaaaggaaatctccaagcccagatggttgcacctgagaatctaacaaatgtttaaaaagaaattgacaccaattctgcacaatctcatccagagaatagaataggagggaattcaattcatttcataaaatcagagttattttgctactaaaatcataaaaagacaaacaagaacaatgacaacaacaaagcaatgaaactatagaccaatatccttcatgcaaaaatccttgacaaaatatttgtaaattaaattcagcaatataaaaaaatacttacacatcatgcctatgtagggcttattccagaatgtaagcctggcagaatatttcaaaaatcactctcagtgtaatccatcatattaacatgctaaagaagaaaaatgacatgatcacatcaattgatgctgaaaaagcatctgataaaatttaacacccattcgtgattttaaaaactcccagaaaaacaggaatagggggaatttcctcaactcgataaagtccatctacaaaaaccctacaactaatataataagtaatggtgaaaaagtgaatgctttccacctaagactgagcaaaggagaggaagtctgctttcaccattcttattcagtgtattgctggacattctaaccagggcaataagtcaaggaaaaaaagaattacaatttatacagattggaaaggaagcaataaaactgttcctatatttgtaggccacacaactgtctatgtaaacagtcccaaggaatctaaaaatgtactcctataactaataagtgagtttagcaaggtttcagaatgcaagatcaacatagaaaaaatcaatcgtgtttctttataccaataatgaacatgtggacattgaaattaataacaaaatagcacctgcaattgttcaaaaatgaaaaagttaggtgtaaatctaacaaaacatgtacaggacttatatgctgaaaattacaaaatgctcctgaaagaaataaatggagagacatgccattttcatggattgtaaaactcaactagtaaagatgttagttccccccaaattgattgcaatttatattttattttattttgagacagagtgtcactctgtcacctagacaggagtgcagtggcgcgatcttggctcactgcaaacctccgcctcccgggttcaagtgattctcctgcctcaggccccctagtagctgggattacaggtgcgcactaccatgcctggctaatttttttgtatttttagtagagatggggtttcaccctgttagccaggacggtcttgatctcctgacctcgtgatccacccaccttggcctcccaaagtgctaggattacaggtgtgagccaccacgcccggcctgattgcaatttctatcaaaatcccagcaagattttatttttgggggggcgggtgggtatagacaagattctatatttatatggaaaggcagaggaactagaatagctaaaacagttttgacacttgtaccttttcttgttaatttcatgtacaacttttcttgaataaccaagctggcaggtgaggctcatcaagaatatccagattcttgatcttcttaggctttgtaaaggaggccaatacccttcaacgtgcatgggaggctaagaatggagcttgggagagaagagccctccctaaggttactgatgcggtcaggatgattaggagtaagggctcccccacaagttgtggcagcaggtgggggatggagtgtcagatcagttgtcatcactgagggctggcttccttactgcccgggtcctgccagatctgctgccttcctcataggcattggtttaccttgtgattttgtttatctgggctgcactctcaggtgctgtatcacatatcatctgccacttactattattactattattacaatctgcactctagaaccacatgccctttggatcctcacaacaactccatgaaaaaatcgcagctgtcactcttctctggttctcttttggagtttatggtgcctgtgcacttctgctagatcacgtgaaaactgtggatatgactccaaatagttctccagggagtaaacaaagtggtttggggcatcatcttttgaaacttctaaggatacagtgcctgggaaatatagaattagaaggtgtttagtagaagggggattaaaatagatgggaagagccaccttctctagtttcatgttcattggtaatggccggtggtactggaggccatgagcttcctcaagccacaacatggagtaggacttggctgcattcactctctgatatggagtagcccaggagaggaaaaaggttatagtataaggggaacatttttcatttgcaagtacagaagacaaaaacgaacacccttcctcttattttgctcacataatctcattgtcacctgcctgtacatgctttcaaaagctgcctgtacatgttttcacctgcctgtacatgctttcaaccatggaatatttgaacttggatcactatgttagtcaggtgattgcatccataaaaaaaccttcatattccatcatttttttccatttcctttatctctcaaccttcacccacagtcatggtgtcagaaactgcaaaacaaatgaggagagccccaaattttagacctactgtccgtctctacagaaaatagaaaattacctgggcatggtggcacatgtctgtagtctcacctactcaggaagctgaagtgagaggatcgtttgagccctggagttcaaggctgcagtgagtcaagatggcaccactgcactccagtctgggtgacagagtaagaccctgtctcaaaaaacaaaaagcaaacaaacaaaaaaagacctactcaagcccaatcctatctccaagacaatcctgcaccccagttctccacttgccaatcttactcagcttccttcctccttccttatcaccttaatcttaaccatggttaatctttaacagctgctccctcctttttccaactggtaaacttcagcatattcttagaatcataaacgaagatattccaagagttttccctgcattctctttcctagaagggtccatgcttctctggccctgctgtctggactcttaactgtgtcagttagatcctatgcaaagatagttccaaacccaagcctttagagctaatctggaactaagccttccccaccctggcctgccctccctgagatcaacctagtggccacacttccagccccatccttaacctcctttctttctctcccagctcctgcttatgtgtcagtctgtctcctcctcttgtgtccaagggaagtcatcggtgagtacaaggatgggcaagagtgaagaggaaggaggctgactttggaaagtgggcatgggggttcacagagggctcctgattgggggatgtagtgcctggttatccttgagctcacaccaacaatgtctgtccatctgtccagctcccgctggctcagaaccatggctgtgccagccggcacccaggtgtggagacaagatctacaaccccttggagcagtgctgttacaatgacgccatcgtgtccctgagcgagacccgccaatgtggtcccccctgcaccttctggccctgctttgagctctgctgtcttgattcctttggcctcacaaacgattttgttgtgaagctgaaggttcagggtgtgaattcccagtgccactcatctcccatctccagtaaatgtgaaaggtagggaccccgtccctggccagggggtcgggggaagggaggtggaaatgaggaggggagtctagatgtcttcatcactccttttgaagagccctggccctgtagtctaatctctagcagtttctcaaatattttcagttatctccttgtctgttattcgtaatttcttggtttctttttctctgtagcagaagacgttttccctgagaagacatagaaagaaaatcaactttcactaaggcatctcagaaacataggctaaggtaatatgtgtaccagtagagaagcctgaggaatttacaaaatgatgcagctccaagccattgtatggcccatgtgggagactgatgggacatggagaatgacagtagattatcaggaaataaataaagtggtttttccaatgtacacacctgtacccaatgtcgtctcctttcttttttttttttttttttggattgaaataggcaaggaagactattcaagactattgcaatggaggaaagagattgaactcagttctgctgaaacaaaaggctggagagtttttaagtacactattattgtgtgggagtctaagtctctttgaaggtctttaagagtttcctctattaatctatgtgcttctctgttggttgcaaatatatttaggataattaggtcttcttgttgaattgaaccctttaccattatgtgatgcccttctttttttatcttcattggtttaatgtctttgtctgaaattaggattgcaactcctgcttttttctgttttccatttgcttagtagattttcctccattcctttattttgagcctatgagtgccattaagtgtgagatgggcttcttgaagacagcataccattgggtcttgcttttttatccagcttactagtctgtgtcttttaagtgaggcctttagcctgtttacattaaaggttagtattgatatatgtggatttgatcctgtcattgtgctgttagctggttattatgttggcttgtttgtgtggttgctttatagtgacactggtctgtgtgtttaagtgtgtttttgtattagctggttgtggtctttccttctatatttagtgctccttgcaaaatctcttgtaaggcagagctggtcgtaatgaattccctcaacatttgcttatctgaaaaggatcttaggaagcatagtttggctggatataaaattcttggttgaagactttttctttgagaatgttgaatatagatccccaatctcttctggcttgtgctgagaagtctgctgttagcctgatggggttctctttgtaggtgacctgccttttcgctctaggtgcctttaacattctttctttcatttcaaccttggaaaatctgatgattatgtgtcttggggatgatctccttgtgtagaatcttgcaagagttctctgtatttcctgaatttgtgtgttggcttctctagcaaggttgagaaagttttcatggacaatatcctgaagtatgttttccaagttgtttgctttctccctctccctttcagggatgccagtgattcataaatttagcctgtttacataatcccatacttcttggaggtttggtcatttctttttattttttatttttctttatttttgtctgactctcttatttcaaagaaccagtcttcaagttctgagattctttcctcagcttggtttattctactgttaatacttgtgattgcattgtgaaattcttgtgttgtgttattcagctctgccagacctgttaggttcttttttataccagctattttgtcctttggttcttgtatcactttattgtgactcttgttttccttggattgggttttgccatcctcctgaatttcagtgatctttgtttctatctgtattctgaattctacttctgtcatttcagctagttcagcatggttcataactcttgttgcagaactagtgtggtcgtttggaggacatatgaccctctggccatttgagttactggagttcttgcattgcttctttctcatctctgtgtgtgagtgtttctttaaccacagtgtagattaagtacagtcaatagacttcttttctggatgttttccctgggctgaggctttgtgtggggtctttatttgaaactgacttcttgtctctggtttcagaggccggatatgttagtaaggtattatttatgttgacgctttggggtgtgatccagcaggtggcacttaggcttattggtcagttgtatggctcccctatgtttcctcacagttgcagctgtgttttctcacaatgctctgaaagtgtgggttcctctccctcttgagtgctggctgtgattatgacttgggactcctgggctgcccactgcagctctggggtgatctcagtgtttatgttccttcctcaagttggaagcagcagaggaagggatcttattagtggttgtggccaagggttgtttgcttgtctcctgggggctccattccagagagatgaaggtcagcagccactcagtgcagtcagctcaaggtggagcatctgtgccgtgggtccatgccaggggttccctgcctggtgatgagcagtgggagagggagtatgggacccatgggaaacagactgatctcctctccttgggttgactgcagcttgttggaggtgtgaataaagcgcttagggcctttgctcctttgttagtctgagggtggcaaggacagttccactgcagaggcagtggcagaggggctttcagatggcgctggaggctctgttcatggagttgctgagttgctactggcttcatagctctggcagggggtggctggaggcctaggcttggagaatctgcctgatgaggagacatgggaatgggcaccaatgtaacagtctgtcctcttttctgtagggctgctgtggtattctgggggcctgctccagtccttagttgcctcagatagtccagtacctggaggtatcaccagtgaagactgtgaaacagcaaaaatagcagcagtccctccctgaagcttcatcccaggatggtacaggcttgttgccaatgcaaaggcacctgtaggaggtggctgaagaccccatttgggaggtcctgcccagtgaggaggaatgggatcagggacctgcttaaagaaacagtctggccatgttttggtagagcagctgtgctgtgctgggggtccatgtcagcccctggttcctcagatactctgaggcctgaaggctggaacagctaagtcatctaaatggcaaagatagtggcccgtctctccctctgggagctctgtcccagggtggttacaaatctctgtaggatggagaacacaaacaggggtgactgtaggtcctggttgggacattccacccagtgaggaggaacgggatcagggacccatttaaagaagaagtctgaccaccttttggtggagcagctgtgctgtgctgggggacctcttctgcccccagtcagctcagactctccaatacccaaaggctgaaacagctaagtcacccaaacagcaaagatggcagcccacccctccctctgggggttccatcccagggagaattcaaacctctgtcagctggagaacatcagcaggggtggctggaggccccagttgatcacctgcttcctgatgaggataggagaagcacttggtacataccattttatcaatttagccagtgtcttctgcagcatccccatttcctcagagggtcaagaccaatttacagtcacctggtaaaggagaacaatagacctttacgtcttgcgtgagggatatttacataaccttatagtggctgctgacctgagtagatggagtgcgctggagaaggcacgtgttttccattacattgatgatatcactaacttctgagtcttttttcagcttacaaactgcaggccccaccttgctgtctcacttcgtgaacagaggatgggtggtcaatgtagacaaagttcagggtccaggcttatcaaatacttgagtgtcgtctggtcaggtaagactaaagttgttccatctgtcattatagatatggtgtaggcctaactgtgtcctaccacaccaaagcagttgcagaccttcttaggccttctagggtattggtgtctttttattccccatgtggcccaacttgttaggcccttgtactgcttagtcaagaaaggggcccactgggactggtccacaaaggaggatgatgcctttggacaagctaaactcacagtgaagtgaatacaaaccttgggtgttctagggcagggacggccttgtaaatttgacgtagccagttactccaagaggttagggcgcagcctgtggcaaaggtgaggacacagatatgtgcctgtagtattccggtcccaactatggaagggtgctgaagttatctgtagaatcatggatcaacaatgctacactacatatcatgccttacagcaaagggaggatgttacaaagggggtcccattctagtctgcagccagcaccccatagcaggttggctgaaggacaccttccagaaaccaaagtctgggaatgcccagacacagagtgtggccaaatagcatgcatgcttgcacagaggagcacattaactagcacagggagcacattaactagcacagggctccatttggtgcgtggccctgtcacctacatgacagctgaaggagggcctttgacacagacactgagcctccgcaaattacctcctcatgcaagagggacagggcccgatttctgaccaggcctggtacagaggtggcttgtcacgaggcaatgcctgcacttggatagccatggtcatccagccatccactgatagtatctggcttgatacaggcaaaggacataatagccaatgggctgagctgtgagccgcctgggttgtctcttctgtgagccggacccaatagtcctgtgcatcaatagctggtccatctttaagggacttaccatgtggctactacagtgggaaacactggattggatggtagctggccgccccctttggggaggctgacatgtggaaggacattctccattgtatctcggacatgcatataatggcctagcatgtggatgcctgcacagcacctgcaccacctggaaatcagcaggtggactagctatcccacattcatctactggaggaagttctgtttctaacttccaaaaaggtgttagaaacagaagatgtggcccactggctaacaaagaggacattaagaacaagatacctatcgggggacctgccccgataatcacataggttcttttctattttcctaagcgtcagctggcttgagaaataaagggacagagtacgaaagagagaaattttaaagctgggcgtctgggcgagacatcacacattggtaggatccttgatgccccacaagccacaaaaaccagcaagtttttattagggattttcaaaagggaagggagtgtatgaataggtgtgggtgacagacatcaagtatttaacagggtaatagaatatcacaaggcaagtggaggcagggcgagatcacagggccacaggactgaggcgaaattaaaattgctaatgaagttttaggcaccactgtcattgataacatcttatcaggagacagggttttgagatcaaccggtctgaccaaaatttattaggcgggaatttcctcttcctaataagcctgggagcgctatgggagactggagtttatttcatctctgcaatctcgaccataagagacaggtacgccccggaggggtggccagttcagagacgtacccctaggtgcgcattctctttctcagggacgttccatgctgagaaaaagaattcagcgatatttctcccatttgcttttgaaagaagagaaatatggctctgttctgcctggctcaccggcggtcagagtttaaggttatctctcttattcgctgaataattgctgttatcctgttcttttttcagggtgcccacatttcatattgctcaaacacacatgctttacaatttttgtagttaacacaattattacagggtcctggaatgatatacatcctcctcaactgacaggattaagagattaaagtaaagacaggcataggaaatcacaagggtattgattggggaagtggtaagtgtccatgaaatctttacaatttatgtttagagattgcagtgaagataggcattagaaattacagaagtattaatttggggaactaataaatgtccctaaaatcttcacaatccacgttcttctgtcatggcttcagccgttccctccgtttggggtccctgacttcccgcaacaggtaccctttgggccacagtgaagaactggtgcccaccactatgacataaagacatagtacacatctgtcaataatgtcctgcgtgtgtgcaggagagccgcagccccttgctgcatgatactgggcagatcagccagggtcggagcctggctccgtggtggcaggtagactatataggacctttgcccgtatctgatggctgctgctatgccttgacttgtgcagacccctacaatggggctaatgcaggcatatcccagcaagcgtgccacccagaaaaccaccataaaaagactagagcagctgtgtgcaacatatggcatccccttccgatatggacggggaccagggctcacactttactggacaaaaatacattatctattatggactgaatgtttatgtcttccccaaaatttgtatgttgaagccctgaaacccactgtagctgtaattgaatgtggagcctctaaggaagtgcttgaggtcataagggtagggccctgatctgataggattggtgtccttataagaagagccaccagagagcttgtactctccctgcacacacaaaagaagaggccatgtcagcacacagtgagagggcggctgtctgcaggccagaaagagagccctcaacagaaacggcattgaccagcaccttgatcttagacttccaacctccagagtgtgagaaaattaacttctgttgtttaagccacccagtctgtggtattttgttatggcagcctaagtgtcctactatgatatcttaatatgtattatctagaaggaggaaaggctaaaacaaagtcaaagccgtgaataccgaggactacgggcacataccaccatgccagctaatttttgtatttttttagagactaggtctcgctgtgttgcccatcttggtctcaaactcctggcctcaaatgattctcttgcctgggcctcccaaagcactgagattacaggcatgagctgccaatacccagacaaggattacatgattgttttgaaaaacattatcgttggttaaaaagattaataacaagggtggcatcagttttgagtttggacaggcagttgctgggcaaatgtctggtcttatttaaagcatttcactcttatgtttttgagaaaagaacttttatctaaggaatgaaaatattttcaattttcaggcccagagaggcattaaaatgagacatccaatcatgtcatactcctccctttgagctatatcttcatctctggaaactgcttgctattgccacaagtagctataaattaacctaataatgccacacctgacactataacccacaccctataacttaataatatgtagccagtcactaaccagtgccatttctgtaaacccatgaaaactgacaaacaactttgtatcaaccccactgcttgtccccctttttttgcctttaaacatccacttgtaactgctgctaagcagagtgtgcattcagtgcaacttgcatccatgatcccaggttgcagttctcaagcttggcccaaataaagttctacttatataattttgcttcagcttcttcctttaaggttggcatatcctacatgctgtaatttttttccctgtttttttctgtacttattttttcctgaatagatcagtagattgagtgtgtgtgtgtgtgtatgtgtgtgtgtgtgtgtgtgtgtatgtgtatgtgtaccttttttctccactaagattatttggaaactatgtgtttgtttgcccactggttgctatatccaacatagtgggaccctagctccacaaatttttcttttttaattagccaggtctggtggcatgtacctgtagtcctagcttctcagaaggctgaggctgaaagatcacttgagccaggaggtcaaggctgcagtgagctatgattgcaccagtgcactccagtctgggcaacagagcatgactctatctctaaaaaataaaataaattaaaaatgttttcagaaatctttaagaccttaaaaatagaattgcccaatccaatataaattgaatttcagtggactaaattaggtgaatcaacctgaagacagtagaaatatcaagattgtttcaattgaatgcagtgatagagaaagaacaatgaccataaaaatacaaagtaaaataaaggccatacactctaaagcaaaaataatgccactcaaaagaagaaagtggagagagagagtgaatagatgttttcaaggtggataaataaataaatctgtattggtgatagtgttggagacctaatgagaacaaaactaggagtaattgtatgagaatatgggtgagcaaagaataatgcctttatttaaataaagtactttgggaggccaaggtgggcggatcacctgaggtcaggagttcaaaaccaccctggccaacaaggagaaaccctgtctctactaaaaatacaaaaatcaaccaggtgtggtggtgggtgcctgtaatcccagctactcagaaggctgaggcaggagaattgcttgaacccgggagtcagaggttacagtgagctgagatcatgccattgcactgcagtctaggcaacagagtgagactctgtctcaaaaaaaaaaaaaaaaaaaaatggagataacaccctagaattgccagaatttaatcttttcaagtatttgtatgatttgctttcaaataaatggtacctagtgagatctttgctaatgtcctgcaagaaacattccaaattgatctcagattttctgcccaagtagtagaaattgaatgactagctcagtttctgaacattctgggtggctagaagggggatgcaagggctccatggcaccatatgggagatatgaaaaataaaatagggatagctaaatgacatgtccagggtagcttactaagtgggtgcaccgagagagagtaagaatcgggctctcaagcttgagactcactgtgttggtgtcactcactgttgtgtatcagtgattgttgtgggaagtcagggaacccgaatggagggacctgctgaagccgtaacagaagaacataaattgtgaagatttcatggacatttatcacttccccaatcaatactcttataatttcctatgcctatctttaatctcttaatcccatcatcttcataagctgaggatgtatgctgcctcaggaccctgtgatgattgcattaactgcacaaattgttcgtaaagcatgtgtgtttgaacagtttgaaatctgggcaccttaagaacaggataacagtgattttcagggaacaagggagataaccttaaagtctggctgcctgtgggctgggcaggacagagccatatttctcttattacggaaaacaggtaagagaaatattgctgaattcttttcccagtaaggaatattaataattaacagccctgggaaaataatgccttcccaggggggcctctaaaatggccactctgggggtgtctgccttatgcagttgcagataagggatgaaacatgctctggcctcctgcagcacccccaggcttgctaggattaggaaattccagcctggcgaattctagtcagaccagttctctgctcttgaaccctgttaagatgtttatcaatgacaatgtgtgcacggcgggacatgaaacttcattagtgattttagtttcaccctgaccttgtgatctcgccctgaccttctgcccttgtgatcttttgtcgcccttgaagcatgtgatctctgtgacccacaccctattcgtacactccttcccctttgaaaattgctaataaaaccctatttgtacactccctcccctttgaaaattgctaataaaaacttgctggttttatggctcagggggcatcatggaacctgccgacctgtgatgtcttccccagacaccaagctttaccatttctttcttttgtactctttcgctttatttctcagactggccgacacttagggaaaacagaaaagaacctacgttgaattatcgggggctgcttcccccgataagtgatagcctgaatgagtcactttctgggtcaagagccaggagctaagtcaaggggagtcagccagagggaggtgctattcaagacgagattatgggtggggttcagattgacagagagaagaagctattgggcaagagtggtgacttgctcactcagatgagttcgaagataatctctactgataaaacaatcaaacttagaccataccattcatggaatgacatggagatgcacatttcagagtattgtgtcttatttttctctatctccattttctgtcagggcaaattaactctgagtacaatttacaactgccttctcttccttggactcagcatagctctcagcagtctcctgtcttatagggacagcctgctgtttctcatattccataggtctagtctattgttgacttacccaacctctcaaggagaaaatgcgagtacacttactttatcttttgataactcccttcttgaactccccatcagtatgaagctcaccctgttgaatggcctagatggaggatattacaaggaaccaaaaggacattcaggaaaagtgagaattttttttaccaagtgataagttttataagaatgaaaagtgggtgccgtacaggtaaaattggtgcaaataatatattgttacaccaaaaggaatttgaagctctgaagaactttcaccaggaatctgaattgcaaaaaaaaaattatgtgtgatgaagattaatgatagaaacatccctaattcaaaaggtcttatttttgctttggattaagcatgcaaaaatctggagtagtccttggcaggaagtgttcttgctgttgactccagagatacggactttggaagtggaagccattaacctggatgtaactgaatggttatatagtctaaggtagaagaaatcgtgtaaagcctgatagtaaaaagtggcaaattgtcctgattatcaaggggggaattgggtagttactacacaatcggcagaagagagtataactataccactcacacaaggcattctgtgggatgcctcttagaactcccacgtcccattgtaaaacatgggaaaatgataataatccattacaggaaggactcctgagggaatgtatacttcatgaagacgtgagtaacttcaccaggttaaaaaatcacagccagttgaggtgtttgctgagagcatagggattatggaatggatagtggaagaaattttttttcaggtggagttctgttacgttccccaggctggtcttgaactccggaactcaaatgagcctcccacctcagccacctgagtagctgggattacaggcatgtgccactgtgtctaacttgaaagaggaaatttttaaatgccagctttagcctcaaggccagctgctgaaacaaggactaagttagatatttatataatcttcctcactttgatgtgtatatatatatattttttttcagacaaggtctcgctctgtcatgtagactggagtgcagtggtgcgatcttggctcactgtaaccttcactttccaggttcatgcaatcctaccacctcagccctctgagtagctctacagacatgtgccaccatgcccagctgatgtgaatatagtttctgtattaactgagtcctctgctttttgtctcagtgccttcatacccctctatgtaatataggtttatattggttgatccttggtatttatagcatgaaagagcaaaaggggttgttagtcatctgggagacggactagcattttcaaatatctcttccatagagaagattaaaggtctttgggttgtaaaatgaatagttgcatcacattaggtggaaaatagtattgttgctgcttttatttggaagttgaaaatgtctacagatgcttatttttgaatggggtggactgtgctagactttctgttgtcaacgtgtccccaacaccactgttccttctgaagtgggaaccacgttttccagaatcacttcccctatatggagcccagaaggtgaattgtatgatgtggaaaattcaggaataacaagcactatcgtatcctcatgtgattcacgttctgacccattataaagcagactacctctgttggtccatttccattgctataaatgaatacctgaggcttggcaatttataaggaaaagagatttaattggctcacggttttataagctgtacaggaagcatggtgccagcatctgattctggtgagggccttgggaagcttacaatatggcagaaggcaaaggaggagcagtcacgtcacatggcaagacagagaacaggagagatgtcagactcaagtcaccagctcttgcacaaagtaacagggtgagaactcacttattactgtgaggagggcaccaagacatttgtgaggaatctcctcccatgaccaaaacacctccccaggcctcacctccaacattggggatcacactttaacatgagagttggaggggacacacatccaaactgtatcacagacaagggcaggaaattgtaaactttcataaccagagctagattgtgccccaaccacagatgctgtgccagatgttgtgtctttattggggcaaatcaaaacagagtttggtacttggtatgcaattattgatctggcagttgtgttcttaccaaaaccctgcagcctcaagtgtgtctgggcaaagatggagctggggtaaagtcctttggactgggtatgagcccatggacgagaacatgcatatggagtcaagtcctgggaaggccacctagaggagggagcagaaacaggacagatgagcaggtagcacccctgcctgcctgggctgagaaaggacttagcactggcgaatacagacccaccttttcctcacccagaaaagcacaagtgagctatcacaggacctggagtcgaggtaggaccgaccacagaattttcagggctcagtgcaaagtgaacatgcagcgctgcttgttcaatatgtgttttggatttcaacacagtgacagcagagcataaaaccaacaccgggcccttgtaagtgcaggggacccgcccttgtggctggctctggagatccacatcctgagatctgacacgagattacaattatgtaagaactcttcctccctgtttttccagaacaaaaactacatagagggaggaggaataaaatatcaggtgggaaagaaagaagtggctggtaacaccctcagcatagctgaaagtttcccaatcatggaaaaactggatgttggtgggaaaacattgaggactcgtcctcaattttccctagtgacaagtaaaggcacctccatataataaatgtatgaggagtgggtagggcaataggaaagacgtttccccagtgctcctcacacttgatatcctctgacatttatgcttctaaccctggggttgggagctgtcaaaaatgcagcccagtctctcagaccctctttggaactggcaggtgactccaaccaaattcccagattaactctctaaattcccatcctcttctggaatgtggctcggtaattgctcattactttgttaggtcattgatgcttttaagatgtttttgtattttgttcagcttcttttattgtctttagcaaaaggattgatccaaattaccaggtctgatattactacaaaccaagaccaattatctgaattttaaaatctttaaagcttgcttgtcaagaatctgggtgttcaaatattgtgatatttgaagtctgagaagtacaagaatgatagaagagtttttaaaaattagtaaattattaataacttggtctatatattcctcccagagaagtaatatattaatacatgaatctgtctctgaaaactaataatgtctaacacttatcgagcacataatatatccaaaatattaccctaattttcttatatgtattaccttattttattctcccagcacatttatctgttaatactaattcctatttcaaacttacagataataaaattgaataattcacagtgaggttaagcagctgactcaggactacaaagatagtaagaatcagaatcagcatttgaacccaaagtatctaactgtagagcccaggttcttaaacatcactctacaatgcctccatgcagggcagggaatagagttgaatgagagaggtatacatctctggtgcaaaatttaagagggtgtcaaaaaatgagtaaggtaatactttgtgccaaaaaatgaataagataagtaatactttgtgcaatttttttttttagacagtctcgctgtgtcacccagactggagtgcaatggcatgatctctactcagctgcaacctctgcctcccaggttcaagtgattctcctgcctcagcctcccgagcagctgggattacaggcgcccgccaccacacctggctaatttttttgtatttttagtagagacggggtttcaccattttggccaggctggtctcgaactcctgacctcaagtgatcctcctgcctcagcctcccaaagtgctgggattacaagcatgagccaccgtgcctggcactatttttttttttttttttgaaacggagtctcgctctgtcacccaggctggagttcagtggcacaatctcggctcactgcaacctccacctccctggttcaagcgattgtcctgccttagcctcctgagtagctgggattacaggtgcatgccactacgcccgactaattttttttttttttttttttttttgagtggagacggggtttcaccacgttggtcaggctggtcttgaactcctgacctcgtgatctgcccgcctcggcctcctaaagtcctgggattacaggcgtgagccaccgttcccagcccagcactatttttaaaaatcaaaattaatgccaaaaaaaaaaaaagaaaagaaaactggagaaggatccaattggatgactagatgcaggtagtatgtgcctcttccacagagaggaacaaaaacaggaagtagatattcacattttgaatatattgtttaggagagaattctagcattgaccaggcaagagacaggaaacagcagaagtaagtaacaagagggtttgaggccactcgcccacttggggacacactgagagctggagatgctctaggatgcaggaaaacagtgagagagaaacccgcagggatccaaaatgagcttttataatcttgactctgggagaaaccctcaaccactaaggccacaggcctgacatacagagctgcctaaagattgcacagggccattgctgcagaaagggagccctcacagaagcccacaggcatctgaacctggaataacctcaactgggagccatttgagagcccagatgccagggatctacacatgtgggtgctgctcctagggggaagtggggatcctaggggctgtcattcacccctgggagggtccctgccaccctgcagcaggctgctgttgagactgcgatgtgaccggaccacactccccccagcctgttgcccatgctgcttgcctgagatgcgccccatcctctctggtccaaggctgaaagcaccattttcagtttatcactgggctgcaccccacattcaggccaagttggaggcaatgtgactgaatctattgcccagttgggagaagaaaaggggagtccaagctcttctaagcacacgcattaccctacccactgcccttatcactttatgtggttccagatatcttgaaggttttgctcattcttcaatcttttttagcccttaattttgtttgactggattgtttcaaaagatctgtcctctactaaaaaaaaaaaatagctgggcatggtggtgcaaacctgtagttacagctactcgggaggctggggtggcaggattgcttgaggtggagttcgagaccagcctggccaacatggtgaaaccctgtctctactgaaaatacaaaaattagcggtgtggtggtgggcacctataatcccagctaatggggaggctgaggtgggaggatcacttgagcctgggaggcagaggttgtagtgagctgagatcgtaccactaccctccagcttggatgatagagtgagactccgtctcaaaacaatatacagatagtttacttaatcctttatcaaatgtgtactgaactaggaatcaggcaatgtaatatatatatacatatatatatacgcattatatataaaatactccacataagaataaaaaaagatgtaattatgcacatcaggccatcaaagaatgagaaagaatgagaaaactcttggggacatggtccaaggtagtcaagagccccaacattttagggtccagggacccttccaaatccctttggagagtcctcctacccctcactccctgctgtcctgtgattccacccccacctggacacaggagggtgaggatggaggctgcagctgggggagatgaggggcactgcagatgggctgggagatgcagtggggcagtgagagaccaggaggagctctaaaccaaaaataaaatcttcagctccccagccaactggacagagcctctcttggccaaggtgacccaagagaaatctgaaaaactaaattccaggccatgatgggaagggaggtcagacaccccttgtgttcaatcccttccctcttggagtttaggcacaactggccatcattaacattaaaatagagagcgtggccgggtgcggtggttcacgcctgtaatcccagcactttgagaggccgaggcgggtggatcatgaggtcaggagttcgagaccagcctgaccaacatgatgaaaccctgtctctactaaaaataaaaaaattagtcgggcatggtggcgcatgcctgtaatcccagctactcaggaggctgaggcaggagaatcacttgaacccaggaggcggaggttgcagtgagccaagatcgtgccactgcactccagcctgggcaacagagcaagactctgcctcaaaaagaaaaaaaaaatagagatcgtaaggctaacacaacagactctgtgacaataagataccaaatttcaacctgactgtcttataacatcacactacagatagccagccctgaaggaaatcaaaatattttgccccaaaatataattctttgacatattttaaaatggccctacaaagccatttttttatgggagaaatttacaactgtacagaatctccttcccattctaggtctttcccagatctaggagagattaaatgagagtctgacaccttttaggtctaaaaagaaacatttatcatctattctctctgaagcctgctaccttgagatttcatctacataaaaagaaccttggtttccacaacttcccttatctgaacgcaagcattactttctactgacttcaagtctttagagatagcttagctctttcaaccaatcagaaaatctttgaatccacccataagcccccacttcaaaatgccctgcattttcaggctgaaccaatgtataccttacgtgtattgatttatgtctttgcctgtagcttctgtctccctaaaatatataaaaccaagctgtaacctgaccaactcaggcacactttctcagaacttcctcgactctgttccccagactgtggtcactcacattggctcagaataaacctctttaaatattttacagagtttggttttttcatcaacacagtgagtagagcagagagaagaggcagagagagaagaccagggtgggagagacgaggataggtgaggagaggaggagaaagaggcagggctgcaggggtccgggcagatctggttgtggggtggggggtctgtgagaggcagggatgcaggggtctgggcagaactagttgtggggtgcagagtctgtgagaggcaggactgcagggtgagctctgagcagagctggtcatggggtggggagtctgtgagaggcaggggtgcaggagtctgagcagagctggttgtggggtgcggggtctgtgagaggcagggctgcagaggtgcaggtgtctgagcagagctggtcatagggtggggggggtctgtgagaggcaggggtgcaggagtctgagcagagctggttgtggtgtgcagggtctgtgagaggcaggggtttgcaggaggggaaggatctgagcagcctgacttgggctcgggtggggtcctccttacttgacgtgcagctgctggtctccactctgctcagtcaggcttcacatcgggtctgatgaatccgagcacagcaggaaagagggtagaatggaagagcatttatgaggatgggtggatcgtttactgaacagtggcatctcaggacaaacattgctgttgggctgggctcagtggctcatgcctataatcccagccctttgggaggccacgaggggaggtcaggagttcaagaccagcttgaccaacgtgatgaaactccatctctgctgaaaacacaaaaattagccgggagtgttggtgcatgcctgtaatcccacctactcggggggctgaggcataagaattgcttgatcccgggaggtggaggttgcagtgagctgagattgtgccactgcactccagcctgggcgacagagtgagactctgtctcaaaaaaagcaaaaacaaaaaaacattgctattggttgggggtggcagagattatagagattcccccagggttttccctcttgttggtaacacctcaccatctctccagaagacaaatacacgcatctgtgatgtatatattcatatatgagaaacaggaatgctgcaatggagtttcgtattcagactagccctaactccatcttgattgagagccaagaaaacacctgctttactgaggcactggtattttgatgatatttttcttttttttttttttctgagacagagtctccctctgttgcgcaggctggagtgcagtggcacgatctcagctcactgcaacctccacctcccgagttcaagcaattctcctgccacagcctcacgagtagctggaactacaggcacctgccactatactcggctaatttttgtgtttttagtagagacagggtttctccatattgaccaggctggtctcgaactcctgaccttgtgatccgcctgccttggcctcccaaagtgctgagattacaagcgtgagccaccgcgcccagcagtattttgataattttaaaatagccttttatatttactacatttgtattagtcaaggttctctagaggacacaactaataggatatatgtatatatgaaagggagtttattaaggagaattgactcacatgactgtaaggtgaagtcccacaataggcatctgcaagctgaggagcaaggaagccagcagtggctcagtctgagtcccaaaacctgaaaaatatgacagtgaagctgacggtgcaggcttcagtctgtggcggaagccctgagagcacctggcaaaccactggtgtaagtccaagggtccaaaagtcaaagaacctgaagtcttgatgttcaagagcagggaagcatccagcacagaagaaagatgaaggcctggacgactcagcaagttgactcattccgttttctttggcctacttttcctagctgggctggcagccgattggatggtgcccccccagattgagggtgggtctgctgctcccagtgcactgactcagatgtgaatctcctctggcaatgccctctcagacacacctagcaacaatattttgcattcttgtattcaatcaagttgatacttaatatttgccatcccaacattgaaacctcctttgcagaattataagtaaggagagaaatcaaacatgactgactccatcttgcttccagcctcactgctacatttggttgtgtgttgtgtgttttctgttttatttatttatttatttatttatttcttattccagcacagagaccaagataactatgagaggaatttaacttatagttcaacttgcagacaagggaaactgaccctccttcttgtccagagattgaagccacattcataaggtgagtttaaaattatggaaggggacttgaattttgctaaagaataggcgtggtcaaacaatgacctgccatcacttaacttgtttttctataagttgcttcctgccccagagtcacataacagggggttgcaagatttataacttccccaactacctctgtagatcacatcactattgtgaaacctaaagcactgatctttgagagagttttcagatttagcacttcggcagacccagggctgccgcctggtcctgacactccctcccaggaactgactcagctgcgtaaagacagctttagacgtccctgtgatgtcatcaactgtttcagtttcccagctccctgcctgtcaaaggatccttaaaaagccctggcccccaaattcttggagagacgggtttgaggagtttctctctgttttccttgcttggctagccatgaaataacaaaagtctttgcaacaatactggttgttctcagtatatttggctctctgggcagtgggcaaggtgaacttgtaggattgttacaacctgattaccttcccagtacctctcctttctccctccagatctggtctccagtcagacatcattttctttcattaggaagaactttctttttagcatctcctataatacatgttcactggcaacaatttccctgaacttttgtgtgcataaaaatatactcattttatatcattatttttgaatggtattttcagtggataaagaattctggaccaggcgcagtggctcacacctgtaatcccaacactttgagaggccgaggtgggcagatcacaaggtcaggagttcgagatgagcctggccaacatagtgaaaccccgtctctactaaaaatacaaaaattagccgggcttggtggtgcatgcctgtagtcccagctaccaggaagcctgtggcaggagaattgcttgaacctggaaggcagaggttgtggtgagccaagatcgcaccactgcactccagcctgggcaacagagaaagactttgcctaaaaaaaaaaaaaaaaaaaaaaaaattctggatgcccagaacattttttctctcacaatttgcttgtgtttttttagtgcattcttaattactgtttatattgagatcttaacataatttctatttgctaaaagaaaacttgagccaagtacaagaaaaaacttataatgtcacaggcatagcttaagtccttttttgttagctgagttgattgaggcataatgtacatacagtaaactccatccgttccgtgcactgaacttgttgtgtgagttggagattggatcctttctttctcgatgcacgtgtcagccacggtgttgcatgtgtcagatcgtcccttttcattgccgagcaggactttgctgatgactgtactgccgttagtttctccatccacctgctgaaggacattgggtcagtgtggccctgcctttccctgcctcctctccctacactcctgccctctgtcttgtggtttctccccatctctcctgcctctctctgtcatctctcttgtctctcctcacattctctagtctctcctcacctcacccctttctccctttctcctcatactcttctcaatgcttcccacttctccccatctctcccagactgtattactccattctcacactgctataaagctactgcctgagattgggtaatttataaacaaaagagattaattgactcacagttccatgtggctggggaggcctcgggaaactcgacttcaattatcatggtggaaagcaaagggggaagcaaaggcatgtcgtacatggcagcaggagagcaagacgggggacgtgccacatttttaaaccatcagatctcatgagaattcactcactatcatgagaacagcatgaaggaaccacccccatcatccaatcacctcccaccaggtccttctcctgacatgtaggattacaattcgagatgagatttgagtggggacacagagccaaagcatatcacagactctcccagtttccattctctctccctctttctccagccttctctccctctctcatttcttccctcccagccactctttcttctctctcccaggctgggcctcagcctacccctcccagtctctcctgattcctcttctgtctcccagtctctcccctactctgtctctcctttctgcagactttttttttttttttttagatggagtctcactctgtcacccaggctgcagtacaatggggtgatctctgctcactgcaacctccacctcctgggttcaagcaattctcctgtctcagccttccgagtagctgggattacaggtgcctgacaccatgcctggctaatttttgtatttttagtagagatgaagtttcatgatgttggccaggctggtcttgaactcctgacctcagatgatctgcctgcctcggccttccaaagtgctgggattacaagcatgagccaccacgcccagccttgcagactcttgtcacaggtttctccttgtctttcgcttctctactaattcctcagtcccatcactcccatgcttctctaatttctccagccttctaggttttcagcattttttccccttctagttgcatcggtttttgcccccaaaattggttatttcctttttgagttcctatttgatttaagggatatctgtcagcatatttcttaactttccagtgatgatggagatcacgttttctcattatttaattctaattttattggacacacttctaattttgttctggtaaggttttcattgcattcaacacatgtataattttgcttgtgggtcataatcaaccacaaaatgcatggtgtctacttgggtagttcaaaattatatgtgcctctctctttctttcaatgtcactgctttcctttttcttttttttttcttttttaattatactttaagttctgaggtacatgtgcagaatgtgcaggtttgttacataagtatacatgtgccatggtggtttcctgcacccatcaacccgtcatctacattaggtatttctcctaatgctatccctcccccagtcccccacccccgacaggctccggtgtgtgatgttcccctccttgtgttcatgtgttgtcattgttcaactcccacttatgagtgagaacatgcagtgtttagttttctgttcttctgttagtttgctgagaatgatggtttccagcttcatccatgtccctgcaaagcctttttttatggctacatagtattccatggtatgtatgtgccacattttctttatccagtccatcactgatgggcatttgggttggttccaagtctttgctattgtgaacagtgccacaataaacatacatgtgcatgtgtgtttatagtagaatgatttataatcctttgggtatatacccagtaatgggattgctgggtcaaatagtatttctagttctagatccttgaggaatcgccacattgtcttccacaatgggtgaactaatttatactcccaccaacagtgtaaaagcattcctatttctccacatcttctgttgtttcctgactttttaatgattgccgttctagctggcgtcagatggtatctcattgtggttttgatttgcatttctctgatgactagtgatgatgagcatttttccatgtgtctgttggctgcataaatgtcttcttttgagaagtgtctgtacatgtcctttgcctactttttgatggggtttttggttttttttcttgtaaatttgtttaagttctttgtagattctggatattagctctttgtcagatggatagattgcaaaatttttctcccactctgtaggttgtctgttcactctgctgatagtttcttccttttttctacccccctccctctcagttcctctcttcttctctgggcagctgctcctctctctgcctgccagctcagtttccttgtgtctactacccttccttagggtgggccatgcctccagtccagcctggggaagggccactgtgggtgctcagaatcagagacatggggaggaggcaatgatggggagatttaggcacccgccttcactcctgctcccttagaaaatccagatagcagctgccaagtcaaggaacctgggctcttccctctactggataaaggtgggggctctagagtggtgtgggagtctagcagtcacacagcgtggtcagagccaatactgggcacctctctttctaaaagttggatgtgaggagacctggtccttaatttcttctgaagagaagcctgtttattcctagagctttgaaaataccggacctggttaatacacccagtctatacagtgagcttggatcattgaggtcgttttattattattgttgttattattactgatgtttattgttgttataaccttgactaaagtttatccatgaaatgggtttgatttactgaagttgtcgacagagggtcccctacacacacctcgcaccccggcctcccaaggtcatgtacatgccaggcaggcagtcctatgagccccgggaaatttttaagactccctctgaaggaagggacagatcagtgatggcctgagagggctatggtgggcgtcatcggcccggcctccgtcccatctggtgctgggtagtctttatgagactctaggaaaatttcctaatcgttctccaggtctcgggaacctcctgttccagccaggaagtctcgaggtgagtgtgtcctttgcttggcagggcccagtgatcacaggaggctcgccccaaatttccccaagactccctactggggccgggctgattgcgtgccggcagccctgggtgaagaaactccgtccaaggggcaccaggaaacggccgtggatcaggccgcaggcagggcacccccgccgacctgaagacccagatcagacctggtgccgtccatgccacttgtcgggcgccacctggcagtcacttttagagggttttctctggcgctccggagaattttggatgggatattacccagctgcggtgtccacagaagcgttccaggaccctggcagcggtggcaggctcttatcggtgttgaccccatgctattgtggaataaattccttgaccttgttcctgcagggaaagagtgctatggcctggatatggtcccacatggaggctgcttatcagattcactgtccacaagtttatcaaagcccagctgataaaatgaacatcacatcccgtttctcctagtcacttgtcctccttccccaggaaacctctatccagttgatagtctggccttccagaagatattacaagaaggaaggcttttcagcacagcatagatttgatggctgcagggacagatatggggtgttaattagcaaattaggcgtctcttttctacccttccctaaagtgtacaattgaaaaacactgaagtccgctgctacgtgtcaggcattgtttaggggcacagggagtccctggctaacaggaaagacaagatgcctgctctcttaacgagcctgctcttcagtgtgaaagaaaaaaataacctaagtttatttaagctttgctctcagatcacacgattataaaacaggaggaacctggtagatagtgtaaagtatttcacagtggggagacattagaaaggggggtttcctaaggatgagcacttgcttatagggagaccagacctggcttttctttagcacttgaaagatgtcagacctgctggtggttggacccagtcgatgctgctggtatgtgctacctgatcagagatggtgagcattaacccgtttaaacctgaggttgtgctgctggtgtgtgctacctgatcagagatggtgagcattaacccgtttaaacctgaggttgtgctgctggtgtgtgctacctgatcagagatggtgagcatttacccatttatacctgaggttgtgctgctggtgtgtgctacctgatcagagacggtgagcattaacccgtttaaacctgaggttgtgctgctggtgtgtgctacctgatcagagacggtgagcattaacccatttaaacctgagattgtgctgctggtgtgtgctacctgatcagagacggtaagcattaacccgtttaaacctgaggttgtgctgctggtgtgtgctacctgatcagagatggtgagcattaacccgtttaaacctgaggttgtgctgctggtgtgtgctacctgatcagagatggtgagcattaacccgtttaaacctgaggttgtgctgctggtgtgtgctacctgatcagagatggtgagcattaacccgtttaagcctgaggttgtgctgctggtgtgtgctacctgatcagagacggtgagcattaacccatttatacctgaggttgtgctgctggtgctacctgatcagagatggtgagcattaacccgtttaaacctgaggttgtgctgctggtgtgtgctacgtgctacctgatcagagatggtgagcattaacccgtttaaacctgaggttgtgctgctggtgtgtgctacctgatcagagacggtgagcattaacccatttatacctgagatcgtgttgctggtgtgtgctacttgatcagagacggtgagcattaacccatttgtatctgaggttacagtttttaaatttgaaaaatcggaccttggtgatgaccttgagcaataggatataaataattcccacattcttagcattccaataatggaacactaggcataaatggggttaatgctttcttgaataatttatgagagtctccaaaagttccagtttcaccctcccccaatacctatttctccctatctttacctgttccagatcggtccttggtccagcccccagaaaggcaggtaaccccagggcatcttgtgcatgtcagggttagtggggggcccagtgtgtgtactgtagacacccatttatttgttttgtggtggagcagttcatcatgaatcttgctgtttgcacatgatcagctaagtgaaaggtccatccccagccaccgtgacgctcattcctgtgaccgccccccccactctcctctatattgcctttgtgattataatttgtgtggaccaactcccatgcaggataattttggactatcaacataaagcagcacagccttgataatgggtgatcagaagctcagtgtgttcctctctctatactgaggcttacaatagacctcctgggtctttgtgaacccatagtgttccccgtgggttctgtgttccatgaccaatggttttcagatgctcagtgtccttcctggttgttggggacccatacccagctggcccctatggccatctgacagcacttcagatgtatggctggtgggaggcacctcactccttgtttgtcctctgatgcccacatatttcctacccttgcctgacagctcatttgcctcccagcatatggccagaggcacacctttagcaactcggacagagcccccattcatcctggggcaggtggccagctctttgtgggagcatggcaggcaactgcgaagtcttccacagtgggatagagagtcctgggatgtagggaccagccctacagggtctgtgggtttttctccccatgtgcggagacgagagatcatagaaataaagacacaagaccaagagataaaagaaaaaacagctgggcccggggaaccactaccaccaagacacagtgaccagtagtggccccgaatgccaggctgcgctgttatttattggatacaagacaagggggcagggtgagcagtgtgagccatctccaatgataggtaaggtcatgtgggtcatgtatccactggacaggcggcccttccctgtttggcagctgaggtggagagaaaggagacagcttatgcctttatttttgcatttcagagacttttagtactttcactaattctgctactacctagaaggcagagccaggtgtacaggatggaacatgtaagcggaccaggagcgtgactgctctgaagcacagcatcacagggagacaggcctctggataactgcgggcaggcctgacggatgtcaggccctccacaagaggtggtggagcagagtcttctctaactcccccggggaaagggacactccttttcccagtctgctaagtagtgggtgcttttcctgggcactgacgctaccgctagaccaaagtcggctaggtaacgggcatcttcccgggcactggcattaacgctagactaaggagccctctagtggccctgtcggggcataatagaaggctcacactcttgtcttctggtcatttctcactgtgtccgttcagctcctatctctgtatggcctggtttctcttaagttataattgtagagagaagattattattataatggaataaagagtaattgctacagactaatgattagtaatattcatatataatcatatctacgatctatatctagtataactattcttattttatatgttttctttattatactggaacagcttgtgccctcggtctcttgcctcggcacctgggtggcttgctgcccacactgggaaatgtgtaagtaacacgtcctgggttgacagggtagaatctgagtaataaatttgtgaatgagcccttggggctgaaatcaggaactctgcagggaccccaaagcccagaacccaatattaaacacggtgttatgtgtcagtttgctggtgctgcagaatcaacgacctctacattcagtgtcatggaacaaccacatcatgattgctcctgagtccataggtcatctcgtgattctgttgatctgggccaggctcagttgaccttgatgggggggttgctcacatgtctgtgctcagcaggtagatagactggattctggttcatctacaaagaactcattcacctgtcctcagttgtctggaaataggcttttctgggatgtcctcagctgggacatcagggctctgtctcctccatgtggtctctcaccctccaacaggctggccagagggtgttcacattgctttaatttcctgagaaagtggaagtaccagagtccttgagcaaagtcttaactcaaaactggcacatgatcgatcactccacagtgtcctatagaccacaaattccacagggtgcagacagtcaagggaatggggacatggataccaaatcttaatagacgtaaagtcatattttgcaagtgtgtgaatgaggaaggagagataatcaggactgtatctgcagcctaccacagaccctcccagccctctttgccaaggctgaggatatttatcacgccccctggtaatcccccaaccctctcctgtggggcaaagagccttgcatcattccttcccccatggggggtgggggttgactttgaagagaccaaaaatgcatgtggctttagggtattctgcaaaatcacggacctggatctttttaccatcaaaaagaaaaattcagaaaagacaatccctgagactctggccctcgccctcagaagaagggttgactattcgggagtcccgctgagtcatctgtggtgctaggaacaccaggaatgattgagcctccagtccaagctccatctcccctcaggcccctcagtatgcaccatccccacaatgccagcatttctcaatggactggacctcaaagtgggggagaagcaggtatgtttttctgaggcatgtcaagaaagacttcattctagatatgttagagatatctcaccttcctttctaaatttaacaaaaaagttattaaatatagaattaataaaggaaaaatcatacttctagtataatttcaagagcccacagaaaacagatactacaaaactcagcccagaaagggaagacgcagggccataatgggagggagaggagaaaagagactgatttggggttgggaggccgatgtagactccagggtatgcctcactggaaggaatgctattcctcactgaattttccctcccagggcggggtgagggtcagattcaagtttggcctcaacctgagctgggctaaagagaagatcaggaagtgaggatgaggatgaaggaaggtggacaggactaggtggtggtgggaacaagtaaacgttgccagagtggataggtgcatcctgggaaagaaagctctgagctctgaggtgtgtctttatgtcatactttggattgagttctcaatctcaccacctgcaaggaacagggagggcaagagacatgagggcccttttctctctcctttttttctccaaaagaaagcatgtttttggagagccgcaggtcatcacagactcaggggccttgtgaaattatgctgggaagcagaaatgagcaaaccggcttctcatgtttgttactttgtctcacagtgaccaccataatttcattaaatattagctctcttctccccccatcatttgattactctttttgtaaaatatgggatttttacatagtttgactaaaagtatctgattttcttttgtaatcttatttactattttatttgtaatcattgaatttttgattcatacttttcttcttggcatagcttgttttccattattttatacatgtgagaggtgttcttttaaaacttcatcagcacagcaataaagtgaaaaccaaagctccttttccactctaagcccttgtctttctccttggagtgattcactgtcctctctggtgagaactcagggttccaaacgtgcctagaagagcacacccacagggacacaacagtgggcagcaggggctggggtgcaggtgccctgtggctagcgctcccaggtcaaaccctgaccttgccccactgactgtgactgtgggtgagttatgaagccactctgtgtttcagtttcctcatttgtaaaatgatgatgaaacccagacaagatgaatcaataattgtaaagagttatgaagaatgctcgatgctcaaattacattaaacattgtggaattgcttttctgaaaatattttgtttgttataactttacataaatgcctcattcttttgcttttttttttttttgaaatggagtctcgctctgtcacccaggctggagtgcagtggcatgatctcagctcactgcaacctccacctcctgggttcaagcaattctcctgcctcagcctcccaagtagctgggactacaggtgcccaccaccatgccgggctaacttttgtatttttagtagagacaggggtttcaccatgttgaccaggctagtctcgaactcctgatcttgtgatccacccacctcggcctcccaaagttctgggattacaggtgtgagccactgcacccggtctcttttgctttttaaatagaattatttgaagtatttttgaagaacaaagcatggagtcatcccagcctttctagtggctgagtattattgtggtatagtaattccctcttatctccactttcactttggcgtaggtttcagttacccatgatcaactgtgatctgaaaatattaaatgaaaatatcagaggccaggcatggtggctcatgcctgtaatcccagtactttgggaggccaaggtgggtggatcacttgaggtcaggagttcgagaccagcctggaaaacatggtgaaatcctatctctactaaaaaattacaaaaattagccgggtgctgtggcatgtgtctgtgatcccagctacttgggaggctgaggcaggagaatcacttgaacccgagaggtggaagttgcagtgagccaagatcgtgtcactgcactccagcctgggggacagagcaagactctgtctcaaaagaacaaaaacaaaacacaaaacaaagaaaaaacagttcataaattttaaagttgcgtgtcacactgattgtgaaatgccgtgtcgtcccgctctgtcctgccccgctggtgagtcatccttcgtgcagcatattgacactgtagatgctaccggctcagtagtctccagtagctgtctcagttatcagatcaactgtcatgctattgcagtgtttgtgaaagtttctcaagagggctttctttatcgtaaaataaaacctttattttactttgtaatggccccaaactgcaagagtagtgatgctggcaattcagatatgccaaacagaaactgtaaagtgcttcctttcagtaaaaagatgaaaattctccacttaataaggaaagaaaaaaaaatgggctgaggttgctaagatctatggtaagaatgaatctgctgtacctgaaattgagcaggaagaaacagaaatttgcactagctttgtgtcctacctcaaactgcaaaacttacagctgcactatgtggtaactgttacaatatattgtaactgttctattttattctatcttggatgtctcccttcgatgtaatgatgctgctctgtccagcagacaccgctctcgggtctaggctgctatcagttcaggaagagatgggtatttctggtcagagtattaccacagtgtgttggctcagcctctctgtttccaccagagcccaacaacatgttaatagctccttcagaaaaggtgcatgatgagtggccatttctgggagcctagaagtccagaaactttgcggtcatcagactctgatggcttttccttttggtcagattccagtcttcctcatctcctagcactgaaacttgtcattcaaatggggagctgggctctacgggacacaggggcctgagtaactgcctgaggtagggcctggagtgcattgtactccctggacccccactgggggtccctggaaagcagctatgtctctggttatctggtgcagggggaccaccagaatgcccagatggagtctatgttgtctttaatatccaaaatacccagtgaggcgttgactccacggtctgcaagggcctctctctgcctggtaccagatatcagatgtggaaaggctgtcaatctctttgttagaaacctcctgtggtatcagccaggcacccagaggctgcctctggcacaagcgcttgggtttagagtcttctgactttgtttattttaactttcatcactcattgggtctgatcccattctgctgcagaaagcagtaaagcttttcaatggcttcaccagggacaatgcaagcaaaaaccaatcaagggccggacacggtggctcacgcctgtaatcccagcactttgggaggccgggggaggtgggtcacttgagatcaggaattcaagaccagcctggacaatatggtgaagccccatctctactaaaaatgcaaaaatcagccagacgtggtcacgggcacctgcaatcccagctactaggaaggctgaggcaggagaatcacttgaaccccgggaagcagagattgcagtgagctgagattgtgccactgcactccagcctgggtgacagaacaagacccaggcttcctcattttatatatatatatatatatatattttttttttttttttttttttttttttggtagtgttttttgttttgagacagggtcttgctattttggccaagctggtttccaactcctggcctcaagtgatcctcctgctttggcctccaaaggggttgggattacagggatgagccactgcatctgaccaagacttttttttttttttgatactgagtctctctctgttccagaggctggagtgcagtggcatgatctcagctgactacaacctccacctcccgggttcaagttatcctcccacctcaccctcccaagtagctgggactgcaggtatgtgccaccatgccaagttaatttttgtattttttggtagagacagagttttgccatgttacccaggctggtctcaaactcttgacctcaagcgatcctctcacctcggcctccccaagtgttggaattacagatgccactgtgtccacccagtggtgccctgttaattaatgacccttgttatcaattaagttcccctttgttgtcctgccttgcttagatcagataacagaaaaaccatgactattacaccctttgtaaaaaatgttaaatgtgcccttctcatagagaaacattgcctataagcaacttgctgtaatgatgtgccaaccttttatgaaaaatgttgtaatcctgataaaaacacctctgtctttgcttatatacacgcaaagacagaggagtctaaatgtatgtatttatttagagacagggtctcactccattttctggacaggagtaaaatccactccacttgcacccccagggccgggcaggtgacgctttggcccctacctgggagacactagagctcacactgtgggcacctctggagctgactggggagattctcctgaatcctcggctcccgctgggtctggacaccctgtggcttcccgatcacaggatggcttcacacctcttccgctgtcctgggcccttgcactgattcacatctagaaggggaccaggtcatggagcaaccctcagtccgtgtctcgactctagactcacagggtcagctgtaacattgtggctgtgtgagtgtgggagggtgaggacgaccccaggagtgtcctgcaatttcctatttgccaaagaagcctccattctggaggagagagggaccgagggtggagggagcatcggtcctctcctggctctcaaaggacctggcatcaaatccaccatgacacataccctgtctgggacctgtctcgctccagggcccagcatgtctctgcaggaaggcagggcatcccacgatatcaccagctcctctaggagtataggagccaaggagctgctgagacctgctgatcacccactcactcccctccagccaccccagagccatggctcccgaggccacatcttgggtaaggaggacaggaccccattcccacccgagcccatctcccatctcagccaccaccgaggctcactccccaccccaaactacacctcatccctgtccccatgcctggcctcctcctcagacatggctccatcacagcaattccccatccacagcccctgggtcagccccatccacagctgtttcagtccccaaactactccccaaacttatgcctagccctggttccagtcccacccagtctttttctaaatgtcagtgccagccacacccatagcacaacgctagtctcggctcagccccttccctgcccgaccccagctgagcctccagctctgaactcctccaacaccaggaaacaaccacattgccctgaaccctaggcccatttcttctgagagtcctgcctgcactccctggccttgcccaggacccttgagcacagggagactgtgcctgacctcagatcaccttctagcccttcctcgagctccagtcaggacagagacccccttggacccagtgctgccgcaggctggggtcccaaagatggctcgtggcctcctccagagccctcctcttcttccttctcccacagctgtcttggcgtctctctgcatcctcagccttctctgatcatgtggagcccccaggtgagcccaggaagggctgggaatctgggggaggggtgtggctcccaggagatcccaggctgggacccacctgcccttccacctggacctcaccagctctgtctcctccagtggcccccatgggtgcttatctgatgctgtgccagccacaggcaagatgtggggacacgttctgtgaccctctgcagcactgctactatgacaatgccatcctgccctcggatgggacccagaggggtggaactgcaccttcagagtctgcttcgagaagtgctgcccctggtccctcagtcccccagcgtccctcatggtgaagatgaaaggccagaagtgctccttgaccctgacctcagataacaggctttgtcacaggtgaggtcctgtctcctccatgagattgtgggtcctggggggctgcatgcctgttctgccctgagtagagcccccattctctgtgtctgtcctcctgcctctagtcaatccacctccccctttccctacagttgtatttcttcctcccttcgtttttattttcctctcacaacctcactctctcaacattgctggcctctcctcctggctctcctgtcctcctttctgcactgttcagtctctcccccatctctggcctgctcagtgtctctgtcttcagtgtcagctcagactggagggcagtggctcaatcacagctcactgcagcctcaacctcccagactcaagcgatcctcacacctcagcctttagagtagctgggaccacaggtgtgcaccactgtgcccagctaatttttgtattttttggacagacggggtttcagcatgttgttcaggctggtcttaaactcttgggttcaaacgatcctccctcctcatcctcccaaagtcctgggattaaaggtgtgagtcactgtgcctggccaggacaggagccctggactggccctggctgccctcctcccatcacagatggggttttgtcatgttgcccaggcttgtcttgaactcctgagcttaagtgacctgcctgcattggcctcccaaagtgctgggatacaagtgtgagcaaccacacctggcccctcccctccccctccctccctccctccctccctcccttccttccttccttcctgccttccttccttcctttccttccttccttccttccttcctttctttttcctttctttccccccttcctcccttcttttttgtttttcagggtctcactctgttgcccaggctggagtgcagtggtctgatcatagctaattgcagcctggaactcttgagctcaagcaatcctcctgccacagcctcccaagtagttgggaccacaggtgtgtgccaccatgcccagcaattaaaaaaattttttttttgtaaagactggattttgccatgttgtccaggctggtctgggattcctggcctcaagcaattcttcctcctcggcctccctaagtgctgggattacaggcatgagccaccatacctggccacttcttcattcttgttggctttgcgtccctggaaaaaaaaataaattctgcctcggtatgtggcttaccagagtcatgaacgaaggtttcactacaaggcagtttcatatatagaaatgaaaccataagtttctgggtgctggctccaatttttggagttggtgtttctgggtgggctatcctcaacattcgtgctggaataaactctctttaaattagattctgaccattttgatcaccaggttgacaccatccagtctttggtcaccaaagcccctttgcaaggagagagagatcagccccttcaattctgataactatgctcggagaaaatgagtgacacagcttcctcatcagccagcaaagagaggtgtttaggctggagagcttccgtccctcctgtacacacatgcaatgccaccccatccctgcctatcccctgggaggggctccttgaggccagatggaactaacaccacaaagatgccaggtggaagagtcattctatttattcctggacaaaagagcaagtgaagagagagcctttgagagtgggaaatgtcaaggcccccacggtttcacattccaggagcccagctctgccagccccaccgaggaaccctgggaatgtcagatttgggtctcatccagggatatctgtgaccaaggcctgcctccccttcccagaggggctgggccagcagaggcagggtagggcagcagttggaggcctgtggactggagttcaggagacctgggctctggtccagcctgtgtctgtgaccagcagtgggtcctcggaccgtgtcttgcttggattagaaagtgagatgggagaattaaacaaatgtctgtctgaggtcaggatcttgcccttacttgtcagaaaaacaacctcctttcaccgtgggtagaggtagagttccaacccctgaggatcagttccaccaaggcagagctgggctccagtgccgaagacagacctgtccccagacaatggattggatagggttggggactccacggggctggcggaggcattggacagctctgtgtgcaaaggcttttttgacacctggagaaggggcagagacaggagcactggactagccctggccaccctccccgcttcccagcctctgagagccccctgcgctgtcatgatctccctccactgtctcaccccaggcctgactcagccaccctgagagatcaggctcaggccaaggagggtcagctagactcctctctcctcgggacacaatcctaatcctgacccaagaaacctgctttctcccaccagcgtctaggcctctacctgcctcgagccatcccaggaaatgcctggaaccatggtttgagagatgaagcccgttattgggagatgtgttgggacatctaagtcagcagcacttaggcaagaaggaagccaggccatgcctgcacccttcttcattcctttttaaattttttttttaattgagacggagtctcgctctgtagccaggctggagtgcagtggcacgatctcggctcactgcaacctctgactccctggttcaagcgattctcctgcctcagcctcccgagtagctgggattacaagcacacgccaccacgcctggctaatttttgtatttttagtagagatggggtttcaccatcctgaccttgtgatctgtccacctcggcctcccaaagtgctgggattacaggtgtgagccaccgcacctgccctaattttttttaatttttattttattttattttttgagacaagatctcgttctgtcacccaggctgcagtgcagtggtgtgatctcagctcactgaaacttccacttctcaggctcaggaaattctcctgcctcagcccctgagtagctgggtctacaggcccatgacattatgcccggctaattctaatttctgtattttttgtagatatggggttttgtcatgttacccaggctggtcttgaactcctgagcttaggtgacccacctgagttggcctgtcaaagtgctgggattacaggtgtgagccaccacacctggcccttttcttttcttttcttttcttttcttttcttttctcttttcttttcttttctttctttcgttcagggtctcactctgttgcccaggctggagtgcagtggtcttatcatgactaatttcaacctggaactcttgagctcaagcgttcctcctgctacagcctcccaaatagctgagaccacaggtgtgtgccaccatgcccagcttttaaaaaaaaaaaaacttttgtaaagactggattttgccatgttgcccaggttggtcttgaactcctggcctcaagcaattcttcctcatcagcctccctaagtgctgagattacaggcaggagccaccatacctgaccacttcattcttgttggttttgcttcgctggaaaaaatataaattctccctcaatatgtgacttaccacagtcatgaaggaagatttcactataaggcagttcataaaaatctgtgcagtgtacactaacccatttttgtgtctgtttcttgaattaaaaaaataatatctatgacatactcaagcagttataccacccaataaaatgttgccacccttagtatggaggacactactctttcctgaactgcaaatggagaagccaggggagcagagagcaatggagaaggagaacacgctgtcccctctccacaagggaggaggaagactgcaggcccctcgtgattgcaccattacccagctccagactcaaccctcctctccaccctcctcacaagagagatacagggatgttctacaaccataaatctggtcacttccatcccctgcttaggcctgggccatggtcagtgccctcaggatagactggagttctccaagggcccataaaaatgccccagccttgctgcccactccagtctcctcttcctgccttgcattctggcctctgggttcagctttgtcgaaacaggcacagttctcattcattcttgaaatagtagctcaaatgtcttcttctcctagaagacatcgctggccttccaggctgggtgaggcaaccactgtgggctcccaagcctttacgcgtccccaacccagccctgactctctgagtcatcaaggcctgaggacaatctgtgttcccagtgatggcacatggcccgctattatgtctctgctgtgtcctctgcagcacgtcggggtaaggatgattaggttttaatgggatagtaacgggcgtgtgattggttgccagggagggagtaaaagtgtcccatacttgtgggttaaggttgggggatacaagaggaagacgtgaaggaggctttaggttggggagaagggcggcactgagatgtggctgtagtccaggaatagtcagggtagtggataattttgttaagatgtaaaggatcattaaccttgactctgccttcagctccagccacctctctaagaggaaattgttgggcaggttggggagggctagtcacggaacaaaactgtaagctggaccggttgtgagtgggggaggcgatagaaggattatagggtgggagagtggaagctgaggaagaactgggacctcgcttggcctggtgaggagcagtgtggggaggaggggagaggtcggatgagttcacagaaaaagaagatttaaaggactcagagcttggggtggagactgaaggaacagacaggagagaaagaagaaagatctggaatgagtcacattgggagcagagactagggaggaactgatgtgtaaaaggatgcctggacatcaggcacctcagaccatttgcccattttttgacaaaattatctagatcttgtaggatggggaaatcgaaagtgccattttctggccatttagaacaattgttaagtttgtattggggtcaaatgctgttgcagaagaaaataagatgcttaggttttgggtcaggtgagagttgaagaggttttaagttttttagaacacaggctaagggagaagaaggaggaatggagggtggaaggttgcccatagtaaaaaggtaagtttagagaaaagagagggtagagacatggagaggggggttggtacttgccatccaggggaggtggtacttgccaccaaggtgaaggatcaaggcaggcgtccctgcagtggtcagacacctctggaatgtgggtgaataatcagacatgcatccccacagtgattagacaccaagggaagactgtcttcccgagtctgtgaccagcagcagaattttgagttcatggacaaaacgtgtctcctctgtctctaccagaaacggaaaggaaccaaaattaagggagggagagattaaagagtggagggatatctagcaagagaggttggagaagagaatgaaaagaggctacttacccgatttaaaattggtgagaagttccttcggctgggctgaggacccgaggtcatgggtggatctcatggagagagggcgaggacaggggaccggtctcccaaaggagtcctcctgtctcaggtcttcggcaccaaatgtcacatgagtccatatgaagagagtccaccaacaggctttgtgtgagcaacaagactgtttattttacttgggtgcaactgggctgaatctgaaaagagagtcagcaaagggagataggggtacagcagttttataggatttgggtaggtagtggaaaattacagttaaaggtggttatctcttgtgggcagggatggggatcacaaggtgcagggtggggagatcatgagactcattgtctaggggaggaatgtcacaaggttgatggattagttggggtggggcaggagcaaatcacaatgatggaatgtcatcttttgtggttcttcagttgctccaggccctctagatgtatacgtgcaggtcacaggggttatgatggcttagcttgggctcagaggcctgacaccagagagttggccaacaccccggtacagttggccagctgcactagagctgctttgttctcctgatttgaatttcagtggtttcttacagtttttgctgctgctgtagagcatttaagcaggaagggatccagttcagccatccagggactggcacccaagttcttgttgcaggtagcagggaccagcttgcaagcttgaagtgtgcagatggaacacagagcactccagccacccaggcagatatcagaggatgggccctcaggcactggtgaggcccagtcctctccctcagtgacatctgcattcctagcattctgggtttttttgtttttgtttttgtttttgtttgagagagtctcactctgttgcccaggctggagtgcagtggtgcaatctcgactcactgtaacctctgccttccaggttcaagcaattctgctatctcagcctcccgagtagctgggattacaggtgcatgccaccacacccagctaatttttgtatttttagtagagacagggtttcactttgttggtcaggctggtctcaaactcctgacctcaggtgatccacccgtctcggcctcccaaagtgctaggattacaggcatgagtctccgatcccagccctaacattatttttgaacatctgaaatttcaccagattcctgtctgtcacctgggagaggctccctgaggccaggtggaaatcatacccggatgccaccagaatgatgattcagccctttccgtgcttgttccagaggggaagcccatgaaaggaggacagccagtgctctcctgtgtgccacgttccagaagctcaggtctcccaccagcagctggggttgtgggaaagtcttccctgaggccagcccccgggtgcctgggatcagggcctgcttgcctttctggacgagctgggcctgggactggggggggttgctgggctgagacaggggtacctgggtccagtctagatggtgtctgtgacctgcaggggcccctcatgccagggtgctctttacatagagggaatagggtgagaaaatatgaccaacagatgttggagtttactgttatttcccaggaagccatgagaatcctgtgaccctggaaagagacagggttcccaataactagggacatggcagtgagtgatgcagccctgctccctgtcctcaaacagctctaggtccactgtccctaaacagtgacaacacagagtgggcagctttgggatgtggaatgcacaggcggctgcttcgggaattttgatatggggttttagcagctcctgctgcttgctgggaaaaatccctcagggaattgtaatggacttcaggagaaatgacacacaggtgctcgtgtatatgaaataagttgttgttttgttttttgtttgtttttgagacagtctcactctgtcgcgcaggctggagtgcagtggcacgatctcggctcactgcaacctctgcctcccggattcaagcgcttctcctgcctcagcctcccaagtagctgggattacaggtacctgccaccacactcaggtatttttttttttttttgtagttttagtatagacgggattttgccatgttggccatgctgttctcaaactcctgacctcaggtgatccacctgccttggcctcccaaagtgctgggattacaggcgtgagccaccgtgcccagcatgaaataaattttataacctgaataggacccggtaatataggagttaagaagaaattattttaggcagatagtgaaggtaagaaagtccttggtaaggtttttcttttaatgaaaagcaccctccaaatcatatacttttccaacaaacagcagccattaaaatcaagccacagacatagaaaggcaggctagaagcttccacaggtgaatgccagcatttgtgccaataggaaaaggctacctgggactaggcattttcaaaatggcagctccatcttcccttttcctttccaaccacatgcacagtagaaagcagataacatggcatccaccaagtggaaagtccatttgcataataagattagggtggggtggtcagcttcttccagcactatgtaaatgtcacagctgatccaaccaatctgtgggccctatggaaatcagataccacctcttcaaacccgtctataaaatccagtgcactctgctgtaggctggaagtcccattcaggtgctgagagagagagagagagctgttcttctttctctctcttttgcctattaaacccctgctcctaaacccacttcttgtgtccatgtactcgattttcttggtttgagacaatgaaccttgtgtatttaccccagatgatgacgccacattaccagtgtcagcactccccaagaagaaggattgaggcttggtccagtgtgaagcaagtgggccgttaaacacgtggctttggctagtttttgagcatggggctatggtgagggttgctgcctgtgggctggggcttgagtggtttgaacgtccttctgctgccaagacagaaagcacatggtgtgcccagatgtgcattggaggtgactgaggaagggctgggaagctgacaatatccaaaaatctaatgttgttgtcatacagggagataaacagggctactagaaaatagcttatctgaccctttgagaaaatgtagagagaagagtccaacccagggctgtttgaccacaaagtctcaggattgctgagagagggactcttgcatccacagagccctggccctgccccactgccctccctcgaacccagcttctgacaccccctgccccgtcatcatcacccactgctgttttctctacccagcctgactcagctgccctgacagatggggaccaaggccaaggagggccagctgggctcctctcttccaagagatggcaactccagccctgccctcaggaatgtgcttttctccctggcactggctgctctccaggcctaaattcaaccctgtttttagcacagaaaaccaggccaaatgccacacccagtctcagcatacgaagcacctagaactgacactgtgagctctgaactctttgtgtgtgtggggcggggtgagggggagcaacatgcccggacaggtagtcagtgatttttaagaaagatggaggcgagcttatacccagaggatttttccttccagtgtttagtaactgtttggctgtgacttgctaggaagcactcatattacatcagtccaaaagaaagtttaattgaacactgatgaataagacactgtgccatgcacactcttctatttcttttgattctagttgaatgtataagatacccatgttgatgaataaattgattcacaacctgagagtgtcacaatccccatgttggagatcactgctctaccctgcagcttcaggagaggggaggccagaaggcagaatgagaaatggggtcgggggtgtgagtgcttatctcatccacccatgacagcgagtgggcctgcaggactctggaaattgcatgagaatttctgctccatcagcttcctgcctggtctcatgctcccatctcaatcctctcacccaccctcctcccagcagaaggacacacggattttcctgaatcacaatctgatcacttctatcccctgcttaagacctgtctgtagcttgagtacactgagaagaacagttctcaccaaggctcataaggggaggtggacaggggaagcgatggggatggtgggagcttccctggccttcctggacaccccatcctctcagcacctccacatgttcagcaactgggaagttcaactctagtttttcaagagtttttataaagtttggtccttatctcctcgccattgccacttttcttggaagttggtgggtgatactgaaagtttctaccctctaatcctcaaatcttttggtctttgtgatgactggcatgatactgaggctacctggggacccttccctaattcacattttttttttttgagagggagtctcactctgtcacccaggctgaagtgcagtggcatgatctcagctcactgcaacctccgcctcccaggttcaagcaattcttctgcttcagcctcccgagtagctgggattacaagcgcccaccagcatgcccagctaatttttgtatttttcgtagagacggggtttcgtcatgttggccaggctgttctcaaactcctgacctcagatgatccacccgcctcggcctcccaaagtgttgggattacaggtgtgagccaccgcacctggcccctaaatcacatttttagcatgaactcagctggtgtgatctgaaagagtctcatctggaagaacaaaagacattcctatcactcaggaaattccaagtttagcttcatggtaggaacaagagtcaaagaacaaacattttcatgttatagcacacccagtaagccatgggttcatcagattggactctctttgctctgccaaattggcagcatttgtgagttaccaatcccaagggaggactcccactgcagggaggatggcaaaggtcaccactgcgctaaccacccggaataggggtctgaacacttcagccaccgcatcttgggctgcactctgactacactgagcgtggtgaacagaacacccacagccacagccagttcgacaaagcaggttaattacttacagacaggcagcgagggacagcggaagcctaggctgcatgactgttcatctctctgtacgacaagaacattcaatttttggatattgtcagcttcccagcccttcctcagtcacatccagtgcacatctgggcataccatgtgctttctgtcttggcagcagaaggacattcaaactggtctcccggggctcaggagcactgcccagggcagatagagtctcccatgcctgccccacttgcaccacagctgaggactcagcagtgagctctgggttttagatgtggtggacacgccctgggctagtgtggcaggacaccccctctaggagggatgggaatgaggccagggctgtcctgggcagtttctctttagctcaaggtgttgcattctctcggaggaatagaaaccaagcttgggcactttcaggcagttcctccttactcaggatggtgcattcttatataatttggctctgtcttgccacacaaatctcatctcacattgtaatccccatgtgtcaggggaaggatctggtaggtgattggatcatgggggcagttttttccatgctgttctcctgatagtgggggagttctcaggagatctgatggtttaaaagtgtgtagaagttcccggctcgctctctttctctcctgccaccatggaaggcgtgccttgcttttccttcaccctccagcatgattgtacatttcctgaggccaccttggcgtgcagaactatgagtcaattaaacctctttcctttataaattacccagtctcaggtagttttttttagcagtgtgaaaatggactaatacacatttctactgtattctacagtgattctgggaactgtgggcaagaagagaggcgggaaagccagagccatccaatgcttgtcttctggtgccctcctccaggaagccattcctggtgccctgggcgctgctcccagccttgctcaccctgggtcatcaccgtttttggaggggtctgtgtcctccccagactataagacccagaaaagcagggcctggagctaagtcacagtcgtgtccccagcatccactgacacagagtaagtgcatagtgtgtgctaaatgaatgaaagaaaagtgaaagcatgatgaaagccctgtgttcagggtgtgtctcactcaacctgtctgtcctgtcatggtgacttggtgagaattgttgcctgaaggtctttaaagctctctcccttccagggcttccgcatggagctgcttctcagctgtgccctatggggtcagatgcactggggaagaactaaggctcttctccacagcccaccttttgtccccttagccctcccaacataggacacaccatgtccagggctgcaggagcccaggctgtcaacagcatcagcatcctgctagaagagggtagggatggctggtactcagaagagccttctagattcctaagtttattaatcctttcactgcaactactaagaaaaataggtgtgacattattactgggttacacacagtcacacacacacacaaaaagcgaaagcaaaaattgtcaagaatatgtcagcttccctcaggggagtggcttcttcaactttgatcccaaatgacttatttcagaggaaacctctcccctctcctcagaacaaacacattcacacaggaagggattaaattcctgcaaagaagaagaaggaaaaccttccactggtcctttggtcttaactatcctgggccataatgtatttgagagtccagtaatgactgtggatttttttgctcaaaatatcacagatgattgccaaacattgtgaaatgccattgaattgcacacttgaaaacacacacatacacatgaaaacttaagtaaacgcatatacttaattgtgggggctgcagggggggagcggaaagaaacatccagacatctggtggtaaatattctgctctggttcagctaaaaataaagccctttatcagtttggtcactggaaggacttgttcccttcttgttgatgatcagaaaccttagcaggaactaattctcaagtgtctgccttaacagaaaagccacaaagaaacatggtaagagcgtggcagataacatccacggtgctatcgggaggtgacaggtgactgacctcagccttggtgttcaagaagattccagaaggtgggtgacatttaagggaaaaatgaaaaatgaagagggatgggagaattggaggcagaagccagagagacattgtggttcttccaaggaactgtgctaagtcgagggcagtgagagccagggaaggtgtattaatcagggttctctagagggacacaattaatagggttctttagagggacacaatttatatatatatatgagtttattaagtagtattaactcacacaatcacaaggtcccacaataggccatctgcaagctgaggagcaaggaagccagtccatgtcccaaagctgaagaacgtggagtctgatgttcgagggaaggaagcatccagcacgggagaaagacgtaggctggaagctaagccagtctagccttttcacgtttttcttcctgctttatattctggctctgctggcagctgattagacagtgtccacccacgttaagggtgggtctgcctttcccagcccactaatgcaaaagttaatctcctttggcaacacccctacagacacacccaggatcaatactttgcatccttcaatccaatcaagttgacactcagtactaaccatcacagagggtgtgcatgatgtggaggtggacacttggcatccagccaacttcttcaggactttctggtctgcagaggctggaagcttcacactttccttcccagagggccttgcaggtggggttctggatacatttgaatctctggtagcacagtcattgtgtctctgggtgtatccacagtaacatctcacatccaagcaatagctctgaatggctgaaaggctgttccagacacagaaatggcacctgaatcttgagtctcagctcagcagattgttctagcttcattcctggttggcaaaccctggggcctctcctccagcctctcctatgacatggaggctcttaattcactggtctgcatcatacgaaggatcctgccagagcagggattaggctttggtcaacagaagccaccttgcagggagcttctgaaatcccaacatagtgtttggagaaaatgactcacacagactcctccttgtcagccagcagcggacaggcctctggcctggggaaacccggccttccttctacatacctgacatacctgcacacctgaaattccacctcattcctgcctgtttcctagcagggcttccctgagggcagatggaaaggccactccaaatctgccaggagggagattccttctattttttcctggcataaaagggcaagcagtgggggagctgctgacagctggaaatgccaacgtcctccggggtttcacattccgggtttcacattccagaagccaagatctgccagccctgcctgttctctcaccccgcttcctggatccaagcaagacacgggctgaggtactgctgctggtcagtgacgcaggccaggcaagaacccaggtctcctgacctctcacccatgggcttcccaactccccaggcctggtctctctgagaaaggaagacaggccctgttcacagacactcctgaatgatacccaggttctcgggccaggctggcagattttggttcctggaatgtgaaacctctgaggacttggcatttcctgctgtcagcagcttccctacttctattgtacaatagtataatatgatcgaatgatagaatgatattctaccattacgtggaatacacacagttccaataagagtgtcataaacaatctagcacagcattctggttagggcacactgtcccatttcttaatccattttttttttcaattaaaaaataacattgcttatgcccaactgatggttttccatgttatcagcacgtcctaatctgtgtcctggaaaacaacactctaccccacagcaacaaggcatggaggccaatggagaagacagggagatggtgctggaagcagggtctgctcttcccctggggaaggtgcgtgctgagcactctggtatttatcatgagatcatttctgctgcagcctcttcccttgtcgcctgcctccagagagaagcccctgtccatgctccccagaaagatacaggatcttccacacacacagatctgaccacatacatcccctgctgggaataaccctggggagaatggcttgtccataccaggtgtggcctgtgaactcacaaactgaggaaatcctgcagaagctgggaggggcccacagaactgacccaagacagcttcttcccctctgttttttcgtcctgaccccaagatggctcttctgtggggaaatcacacacccgaccctctgaaaaagcacgttaaggaaaaatgtccttgaaaatctcaggagggctgtggaatttctccaccaccagaacttcacagtgacaatgacaccaaacacaagaacgacaataaccaaaatcaggagttttattctcctaccttctctctctctctctctctctctcctctcactgtcatgaacgtcacgaagacactgactttgcattttctactcagcactgcatcaccagtgtctgacacaaagcctgggacatgtgggcttccaagtggacctctcctggataaatgaccattaatgaaacagagaaggagttgaagagcccccagaggagtgtgagtcccaggggtcccgccagctccactcccaccttccaaacctgtgaaagtcaggtgcctgagtcgcacagtctctcccacccgaatgccatgagctgcaggtgagtgagcagttactgcatcctgggccatgggcttgggttgtgaagttaggacctgattagaggatgtcaggggttagcaatgtaccaaggaaagtggagaaagtcatagctcaatgggatcctgtggaatcactgtgtggctgtgtgagtgggggagggcggtaactataggagcatgctgcaccttcctgtttgccaaagagggggcatgtaggacacagaagcggagggtgcaccacttctccctgggttctcaaagtgtctgagatcaaatctactatgacacataccctgcctggctcctttactgcccagcgacccagcctgtctctgcaggagggccagacatgccgtgacatcaccagctcctctaggaatatgggatacaaggagtggctgagatcggctgatcaccagctcactccgctgcagccgccccagagcaatggctccccgaagccgtgttctgggtaaggaggggaggaccccattcccaaccgaacccatctcccatctcagccaccaccagggctcgctccccaccccaaactccctgttccctcattcttgttcccatgcccagccaaatctccaggcgtgaattgctcacagcaattccccatccacagcgcccgggtcagccccatccacagccctgtttcagtttctgaactgcccaaagccataccgagccctggttccacccaatcttcttctaaatgtcagtgccagtcgtatctgtggctgtccactcaccccatcttccccttccctctcccacagctgtcttggccgctttctgtttgtgactctccctgcctccactccccccaccaccccatgaaatgatctcatttggtcatttaaacggaaaactaaaaagttttaagtgactctaggagagcaggagagaggcaggtctcccagctcagaccccgccccgggacggccccacggaagatgcacatctggatgtaggcgctcaaggcaccgcgcgtgcgccgagtggccttgctcagctccgtccttctgaaacccggaatcctcatgtgtctgggtcccgccccatcctggcctcctacaccactggtccagatcctccaccttcccccaacgcgaggtattgacatcaaagcatcacctcatctggcacaagaatctgaaacacagaccgcaccttacaccaacgtagtgaatccctccttggacctgagttcaacaagcccagagtcggggctctgggttcccgcccaaatgccacgcatgcacacagatggcacctggcgtctcctcaaagggacaggaatcccgggcttcccagaatcaccaggtcgatttaaatggcatcagatgaactggaaaagaatgaaagtgctattgcctaaagtgatgaaattttcagaggatgtatcggtcctgtctggtggacagacggccaccagagggaatgaaccagtcttctctgaacatccatgaggatgaagaacagtcactgaggtgacggtaccaagtcaccggccacctcccagggatcctctcatccggtcctcacagcagcgctgcatggtcggacctcatcacccacattccaccaagaggaagctgaagcccagggccttcatccactcatgtcctccagacccctggcacccatcctgggccccaccccatcatccaggccttgggccttcgacctggggagagtccctgtctcctccatgagccgtccagggcctgaagaggtatccaataaacaagaaagcagaacacaaagagctgtgatggagtggatcttatgtagtaagaataaaattattttgagaaattactgggtcatgtatttacccacagaaaaacagaagcaaacacacgcgtgcgcgcacacacacacacacacaccacacaggctgtcacgtgtcctcagcacaaagtgccttgagaaaggccattgctggccccacacttatcctgactgtgatcttgctgtgatcagcacatcccatcagtgtggcaacaggtgtggccagagtgggaaccaggccttttcttcagatttgctctttgttcctgaatagccaccgtcagaacagacaccctcctaggagtcacttgattaaaaatttccttttggatatttaggttgatgttttatccatcggttaaagtataaatgtatatttattataaaagtgtaattatggctctaattaatgattatggtgaattttactaactatagctatgaaaatattccaatagataaaaacagtgctaaaaatgtacagttaatccaagagtggtaactttaagtcttgtaatttttgatctaataaatcttcataaaatatacatgatcatgaagtacatcagtagaattaatcctaatatttacagcaatacttggcgtgctgtctctcataaaaaataacattaatagtaaaaaaaaaaagaagaaatcggccaggcacggtggctcacgcctgtaataccagaactttgggaggccgaggcaggcagatcacaaggtcaggacatcgagaccatcctggctaacacggcaaaaccccgtctctactaaaaatacaaaaaattagcccagcgtggtggcgggtgcctgtagtcccagctactcgggaggctgaggcaggagaatggcatgaacccaggaggcagagcttgcagtgagccgagatcacgccactgcactccagcctgggtgacagagcgagactccatctcaaaaaaataaaaaaataaaatagtaataaagaaatgatgaaatttaaaaattctatttaattttgggttgtttaattttcatttggggcatgactatgtgaagtaataaattttgtttgggcattaatatgggatgacctatgtctccccctaaattcatgtgttgaggtcctaaccccagtatctcagaatataactgtatttggagataaggcctttgaaaaggtgattacagtaaaaggtcatatgagcaggacctaatccaagctgactggtgtccttataagaagaggagattagggcacagacacacactcagcggccatgtgaagacacagggaggaattggccatggataaaccaagggatagaccctcagaaaaaaccatcctgccaacactttgatctcatgcttctgccttccagaactgtgaggaactgaatttctcctgttcaagccacccctctggtgcccttgattatggcagtcctgggggattaacacaggcagaaggaaaatgaaggatgcaagagtcagagaaaggaagaaaatgaaatgtaatttctcctcaaacaattttcaaaataatggactttgggaaaacactttcaggaaattattctaaactgggtgtttgacgttttattctaaactgggtgtttagtgttttaagtgttttgaagtttttactattaatagaactatttgaatagttgaagaggaaacatatttgaaacctgatgatattatgactcctggctaaggttctgtaaccaatggaaagtcttgactgtgagttgtccaggctcttggcatgttaaacaaagaattgaacaaaaatcacaagcaaaacagcggaagaggaagacatagatttattcaagtgaaagtacatgccccagagtgggagtgggctcgagcaagcagctcaagagctctgagtgttggtaacccccctggggtaccatttagaggcctccaattggttgcaccctatgcaaatgaaggatttggtgcgtggccaatcagagactgaagtggagttacatcctatgcaaatgaagattgattggcggccaatcagaggctgaagtgaaggcttggcccatggccatcaaaggctgaagttctccctttggtttaattccaagaagtcagccgtgggttggccttaggctccttgtctccagaccctattctcctgcctcagttccttctttagaatatattactaataactgcctgggaatgatattgccctagacatagacacttgagtgacttcctgcaatgtagccttctaagagagtccatccctacagcatgtccacaggcagtgtgaggcttcaggggtcccctggcagctggcagcactgaagaatgagttcaagcttgaaaattgactgctaatcacagcaacaataaaactattattttttaaaaatctgataacattctagattcatcattttttgccccagtttgttccttggtggtgatattcaccttaagcctcagggtctagagaaaagagaaggtctctcaggaattttagcattagggtaaatcttacaaatggacatttgccagagagtgtagggagcatttggaagcctggcagcagggctgagaggatgagagggataggagagagaagtgagagaggaggcacatactccagggagggcctgggaatgtgctgcatagcagaggcaggaagggtacacagagagagtggacaggttcttgtctggaaacccagagacacagagcacaagatgggtagccagagccggggtttcgccatattgcccaggctggtctccaactcctggcctcaagccatccacccacctcgaccaaactgctgggattacaggtgtgattcacgacgccggcctttttattaatttttaaaccactttttcttcaaatttggactggaaagtgagatgagtcactgagctggccttttgattaattgttttatggaatgcttcatgaatttgggtgttatttaaaccacgtttatgtcaaatttggactggaaagtgagatgtctctaggatacctagagtaaggtcttacttgacggtcgtcagaaaaacacagccaaacctcttcaatattctgttacagctgattggaaaatgctggtgttatcattgttttttctggtctcttcaaagttaaccccactttggaagcaactagagccttgtattgggagagtcctaatctacccatccgcaccactggtggttgtatagtggggacaggtgggcttggaaagtagtggagatttgaacagggctcaggccgtttgggatctcatgttgtaggactagggttcagggaggaatgacacaggctgcttgcactaatacatggtttgtttaacaatggttctgggccctggggtccctgcagaactccctgatttcagcctcctgagggctcattcagacttcttattcagatctgactctgtcaccccaggatatgtttcttacacatttcccagagctctctgtatcccagggtgggaaactctcaagttgcatccatcctcacacaacgagctgccaggatgaatggggctctgtccgtggtgctgaacatgtgcctcgctgtgtgctggtaggtagatgagttgtcaggcaaaggcagaaaacatatgaacatcagaagacaggcgtggagtgaggtgcctcccaccatccacgagtttccattactggtttccttttaagctattcattgggtaacaaatttgcttgtcatcctatatcgccaaagtcattgtagaaaacatctttcacaggcttttcacacaggctaggaagggacactcagaccatgtgtagactgtttgctgagtcaaatgtcatcctctgcctcctggttgattcttttttttttttttttttttttttttttttttgagactgagtctcgctctgtcgcccaggctggagtgcagtggcacgatctctgctcactgcaagctccgcctcccaggttcacaccattctcctgcttcagcctcccaagtagctgggactacaggcacccgccaccacacccggctaattttttggattttttagtagagacggggtttcaccatgttagccaggatggtctcgatctcctgacctcatgatccacccgcctcagcctcccaaagtgctgggattacaggcgtgagccactgggaagtttctcttcattcattcacttctttatagattgtcccttgaggtcttgtgaatccttaatttttcaagactaaatacttccttttctttcgtaacacatagtatctgattttctgggaaactttctatttgacaaaatgggactgggatgtcaacatgaattctccatggaaaggctgatctcactgatttagaatttgtggtggttcttgtggtaagatacctgaagaaaatattgctcttatgtgacattaaaaaagaaaaatgtgacacttaaggtgagtaaaatgaaggtgtgtagttctctgctccctgggcattagtatgtaggaactggatgctagaaaatctttggctttgctttcagcttttggctcggaggaggccaaagtgcacctttcttcggtcgtcccaaatccaggttcatctgacaccagccgcctccaccatgccgctgaagtttgatcccaatgagatcaaagtcatatgcctcaggtgcactgggggtgaagtcggtgccacttctgcgctggcccccaagattagccccctgggtctgtctccaaaaaaggttggtaatgacattgacaaggcaataggtgactggaagggccgtaggattacagtaaaactgaacattcaaaacagacaggcccatattgaggtggcaccttctgcctctgccctgatcatcaaagccctcaaggaaccaccaagagacagaaagaaacagaaaaacattaaacgcagtaggaatatcacttttcatgaggtcgttgacattgctcgacagatgcggcaccaatctttagccagataactctctggaaccattaaagagatccaggggactgcccagtctgtgggctgtgatgttgatggccgccaccctcatgacatcatatatgacatcaacagtggtgctgtggaatgcccagctagttaagaagcacaaaggaaaatatttcaataaaggatcatttggcaactggaaaaaaaaaaagaagaaaatctttggtttcatcttgagggaaaggcaaaagacactgccagccacttccccaacactgtctctgtagatcacgtcactactgtgaaacctaaagaactggcctttgagggatttttcagatttagcacttcagcagactcagggctgtcgcatggtcctgaggctccttgagtattgctcctgcctgttgggcttgttccacccactcggcctggctgcactcagaccacactaccacgtcagatcccacacccaccacaggcaagccgggcatggagtggtgagcggtgtgtcagcaagcgagcatgaggtctggccactgtgcacagccaagcactctggctgctttggtggagtgggcagctccatgagctggcatagatgccatctccatgcaaggccgtggctggcccagatgcaggtgcctgcagcagaagctgcatgtggtacatctggacaaggggaacatggcagtgcctggaagcttggagacaccaagaaccacagagccccaaagagggtgtcacagcctagcttgacaaacccctaggtctccagtcctcaaaaagctgcagcttttctctgcttcttgttactggtaatgtgcagagtgggaggtcatgtttcagccctgttcgtgttacagttctttcaggggctgggacctaagttctttttgcaggtagcagggaccagcctatgtgcgtgaagtgtgcaggtggaacacagagcactccacccacccaggtggatatcagaggatgggcgttcaggcactagtgaggcccaaccctctccctcagtgacatctgcgttcctaatattctttttgaacatctgaaattccaccaaattcctgcctgtcatctgggagagactccttgaggccaggtggaaatcacacccaggtgtcaccaggataatgattcaatctcttctgcacttattccagagggcaagcccacgacaggatgaaatcccaatgctctcctgtgtgccacgttccagaagctcaggttccccagcagcacctggggttgtgggaaagtctttcctgaggccagcctggggcatctgggatcaggggctgcttgcctttctggaggggctcagctcaggactgagggggattctgggctggaacaggagtgcctgagtcccgtccagatggtgtctatgagctgcagggggccctcatgccaggttctttcttacatagaggaaactagggtgacaaaatgtgaccaatgggagttggagtttactcttatttccaaggaagccatgagagtcctgtgaccctggaaagagatggggtccccaataactagggacatggcagtgagtggtgcagcccggcttcctgtcctcaaagagtttcaggcccactgtccctggacagtgacaacccagagtgggcagctctgggatgggggacagacacaggctgcttctttgggaattttgatatggggttttagtggcccctgctgcttgctgggaaaattccccaccttggaattgtaatcgatttcaggagaaatgacacacagttgctcatggatataaaataaattttataaccaaaatagaacccagtgtcagcactccccaagaagaaggattcaggcttggtccagtgtgaagcaagtgggcacttaggcaggtggctttgcctattttttgtgcatgggcccatggtgagggttgctgcatgtgggctgggttttgaggggttcgaatgtctttctgctgtgcagagagggagcacatgctctgcccagatgtgcagtggatgtgactaaggactggaaagctgataatctccaaaactgaatgttcttgccatacagggagatgaaagggctgctagaaaatagcttatctaaccctttgagaaaatgtaaagaaaaggttccaacccaggtgtgtgtgaccgcaaagtctcaggattgctgagacaggggcttttgcatccacggagccccgggttggtcccgctgccctccctcccactcagcctgtgactccctggctctgtcatcatctccctctgctgatttctcttcccagcctgactcagctgccctgagagatcaggaccaaggccaaggacggccagctgggctcctccctccccagagacgccaacccaaccctgccctgaggaatgtgcttctccttggcactggctggtctccagacctaaattcaaccctctttttagcaggctgaatgccaagcccaatctcagcgcccccaggaaggacctaggactgaggctgtgagctctcaacttgtttttttggggcaacaggccagggcagctagccagtgattttaggaaagacgaggtgaacctgtgctcagaggattttttcctcccagtgtttagtaactgtttggctgtgactcactaggaaaagctcatatcacattatttatggcttacacacagcccaaaagaaagtttaattaaacagacgaataagatactgtagcgtgcacattcctctattctttactgatgctagtttaatatctaagatacccatggtgacaaataaattggttcacaacctgaagaagtgtcacaatccccatgttggagatcactgctctaccctgcagctgcaggacaggggaggccagaagtgagagtgagaaatggggtcggggatgtgagtgcttatctcatccacccatgagagcgagtgggcctgcaggactctggaaattgcatgagtatttctgctccatcagcctcctgcctggtctcctgctcccatctcaatcctcccaaccagcctcctcccaacagaaggacacacggactttcctgaatcacaatctgatcacttatatttcctgcttagggcctgcctgtagctcgggtgcactgagaagaaagaccatttctcaccgaggctcataaggggaggtggacaggggaagcgatgggtatggtgggagcttccatggcctccttggactccagatcctttcagcacctccatgtgttcagcagccaggaagttcaattcttcttgttcaggagtttttaggctgggcatggtggctcacacctgtaatcccagcacgttgggaggctaaggcgggtggatcacctgaggtcaagagttcaagaccaccctggccatcatggggaaacctcatctctactaaaaaatacaaaaattagccgggcgtggtggcaggcacctgtaatcccagctactcgggaggctcaggcagggagaattgcttgaacctgggagggggaggttgcagtgagccaagatcgtgccactgcactccagactgggtgacagagcaaaactctgtctcaaaaaaaaaaaagtttttatactttggtctttatcgcctccccatcatcacctttcttggaggttagtgggtgacaccgaaggttccttccctctaatcctcagatcttttggtctttcttctggtgactgccgtgatgctgaggctacctggagaccctaccctaagtcatatttttagcatgagctaatgctgtgtgatctgaaagaggctcattaggaataacaaaagacactcctgtcactcaggatgttccaagttcagcatcataataggaagagggccaaagaacacacattttcatattacagcacacctggtaagccatgggttcatcagactggaccccccttactctgccaaatttgcagcactcatgagttaccaatcccaagggaggactcccactgcagggaggatggcaaaggtcaccactgcgctaaccacccggaataggggtctgaacacttcagccaccgcatcttgggctgcactctgactacactgagcgtggtgaacagaacacccacagccacagccagttcgacaaagcaggttaattacttacagacaggcagcgagggacagcggaagcctaggctgcatgactcactggtcccccgaggctcaggagcacggcccagggcagatagagtctcccgtgcttgccccacttgcaccacagctgaggactcagcagtgagctctgggttttatatgtggtggacacgtcctgggctagtgttacaggagaccccctctggaagggatgggaatgaggccagggctgtcctgggcagtttctctgtagctcaagttgttgcattctctgggaagaatagaaacgaagcccgggcactttcaggcagttcctcctttcttaggatggtgcattctgatatagtttggctctgtgtccccacacaactcttctctcaaattgtaatccccatgtgtcagggaaggggcctggtgggaggtgactggatcatgggggcaatttctctattgttgttctcatgatagtggtcgagttctcacgagatctgatggcttaaaagtgtgtggcagttccctgctccctctctttctctcctgccatcatggaagatgtgccttgccttcccttcaccctctgccatgattgtacatttcctgagacctccttagtcatgaaaaactgaatcaattaaacctcattcctctataaattatccagtttcaggtcattctttatagcaccatgaaaatgaactaacacgcacttctagtgcattctacagtgattctgggaactctgggcaagaagaaaggtgggaaagccagagccatccaatgattgtctcctggtgccctcctccaggaagccatttctggtgccctgggcactgctcccagccttgctcatcctgggtcatcactgtttggagaggtgtctctgtcctccctggactatgaaaaccaggagggcaggacctggaactaagtcacaactgtggccatagaatccactagcacagaggaagtgcacagggtgtattaaatgaatgaatgaaaaaagtgaattgacgatgaaagccctatgttcagggtgtgtctcactcaacctgtctgtcctgtcatggtgacttggtgagacttgttgcctgcaggtctccaaacctccctgtcttccagacagccccagggcttccctgtgaagctgcttctcagctgtgccctacagagtcagatgcatgggggacgctctaaagctggactccacagcccaccttttccccgcttagccctcctaacacaggacacagccacatgcagggctgcaggagcccaggctgccaacagcatcaaccacctgctaggagagggtagggacgggtgagactcagagccttccagcttactacgtttataaatcccttggctgaaactactaggaaaaatagttgtgacttcatcacgtgggttacacacaatcacaaagaaaagggaaagcaaaaattgacaagagtgtgtcagcctccctaaagggaacatctccaaatttggatcccaaatgacttttttcagaggaaccctccttccttctcctcagaacaagcacattcattcacacaggaaggagattaaattcctgtagagcagaggaggaaaaaccttttcacagaggaggttctgtggtcttaactgtcctggggtcataatgtatttgagagtctggaaataattataaagttttttgctcagattatcacggacaattgcgaaatattgtgaaatgccactgaattgcacacttgaaaacacacacacatacacacatgaaaagttaagcaaaaatgtgtatttaactggtggagagtgttggcgggagaacaaaaagaactgtccagacctctggtgctgaatggtctgctctggttcaactaaaaataaagccttcgatcaatttggtcactgaaaagacttgttcacttcctgctgatgatcagaaaccacagcagagacctgatttttgggtgtctgccttaacagaaaagccacaaagaactgtggtgagggcatggcagatgacaaccacagtgctatcaggaggtaacaggtgactgacctcagccttgatgctcgagaagatttcagaggatgggtgacatttaagtaaaagaagaagaatgaagaaggatggggtattgggtgcagaagcaggggtgacgctgtggctctcccaattagctgtgttaagccaagggcagtgagaaccagggagggtgtgcaggatgtgggtgtggacacttggaatccagcctacatcttcaggaccttctgcctgcagaggctggaagcttcacactttccttcccagaggaccttgtagctggggttctggatgcatttgaatctctgggcagcgcagccattgtgtctctcggtgtagccacaggaacatctcatgtccaggtgatggccctgaattgctgagacactattctagccacagaactggcatccggatcttaattgttctagcttcattcctggtggcaaaccctggggcctctcctccagcccctcctatgacatggaggctcttaattcactggtctgcatcatacgaaggatcctgccagagcagggatcaggctttggtcaacagaaaccccccttgcagggagcttctgaaatcccaacattgtgtttggagaaaatgactcacacagacccgtccttgtcagccagcagcagaggggcctccggcctggggaaacccggccttccttctacatacctgcacacctgaaattccacctcattcccacctgtttcctagcagggcttccctgagggcagatggaaaggccactccaaagctgccaggagggagattcctattttttcctggcgtaaaagggcaagcagtgggggagctgctgacagcgggaaatgccagcgtcctccggggtttcacattccagaagccaagatctgccagccctgcccgggagccctgggaacatcagacctgggtgtcttccaggagtgtctgtgaacagagccttcctgcccttcccagaggggccaggcctagggagtttggcagcccttgggtaggaggtcaggagacctgggtcctggcccagcctgtgtcactgacaaccagcagcagaacctcagcccgtgtcctgcttggatccaggaagtgggtgagagaatgatggtgatggtcgtttgaggtcagggtttacatttactgtccagacacctgggatcttctccagacacttgaggacaggcttccactgggaaatcctggtcccacctcacacatctgggtccccaggcagaagacagacccatgcccagacgtggacgctccagagtgggcatgttaggaagggggactccgagggattggtggcgggattggacatggctgtgtgcacagactcttctgacaccttaggaaggtgcagggacagggtttgaacgcagggctgactgaccctaaagcctcctcatgtctaattgggggctcttagtgtccagggagccctggacgggtgcccactggcctcacactgtcccagcctccgaggcctccatgatctgctaaaatctccctctaccttccagatgctgcattgactcagctgctctgagaggccaggaaggagcagctggactcctccctcctcagaggtgcccaccttgcccctgccctggggaaggtgctccactctctcactctggctcatatgcaggcagccttgcctcttcttggtagagacagtaagaccagtgcagggctccactgcagcctcccagaaaatgcctggaaccaaggacctgagaactctacccctttatggaagacatcaaaggggagacatgtcagtggctcttagagaagaaggagatgatcctggaggcttctgtgctcccaagtgtcctcaccatttggctgtgactccctccagaaactagatatctagttctagatatgtgctatgctatcatataataatatcatacgatagaacaatataataatattctatcattacttggaatatacacagtcccaataagagggtcctaaacaggctgggcgcagtggctcacacctgtaatcacagcactttgggaggctgaggtgagcagatcacttgcggtcagaagttcaagaccagcctggcaaatacggtaaaaccccatctctatggagaatacacaaattagccgggtgtgttggcgggcatctgtaatcccagctactcagagactgaggcaggagaatcacttgaacctggcaggcagaggttgcagtgagccaagatcgtgcaactgcactccagcctgggcaactgaacaaggcttcatctcaaaaaaataaataattttttttaaagtgtcataaacagttgagcacagcattctgttgaatgcacactgtcccattttctaacccatttcttcacttaaaaataacattgtttatgcccaagtaaattgattttccatgctactagcacatcctaatctgtgtcctagaaaacactgctgtaccccacagcagcaaggaacagaggccaagggagcagacagggagatggtgctggaagcagggtctgctctgtcgagggagaaggtgggtgctgagcactctggtatttattgaagtcatttctctgcagcctcttcctgtgtctcctgcctccagagagaagcccctatccgtgctccccaggaacacagatgcaggatcttccacacacacaaatctaaccacatccatgccctgctaggagccagccatggtgcctagagggtgacaggtcaccttgcctggcccggaggagaacggcttgtccatgccatgtgtggcctgtgagcttgagcggaggaattcctgcagaagctgggcaggggtaggggggcacagaactgacccaaaacagctccttcccctctgtcctcacatcctgaccccaagatggctcttctcagggaaaatcacaacccaaccctctgaaaaagcacattaaggaaaaacacctttgagaatctcagggggggatgtggaatttctccaccagaacttcacagtgataatgacaccaaacacaagaacgacaataaccaaaatcaggagttttattctcctaccttctctctctctctctctcctctcactgtcatgaacgtcacgaagacactgactttgcgttttctactcagcactgcatcactggtgtctgacacgaagcctgggacatgtaggctcccaagtggacctgtcctgggtaaatgaccattaatgagacagagaaggagatgaagagcccccagaggagtgttgagtcccaggggtcccgccagctccactcccaccttccaaacctgtgaaagtcaggtgcctgagtcacacagtctctcccacctgaatgccatgagctgcaggtgactgagaagttactggattcttgaccatgtgtttcggttgtgaggttgggacctaatgggaccctttgaaatgatgtcatgggttagcaatgtcccaaggaaactgaggaaagtcatagctcagtaggatcctgtggaatcgctgtgtggacatgtgagtgtcggagagtgttaatgccaggagcatcctgaaccttcctattttccagaggactcagtgtgggggacgattggggcacatagcacagagaaggtggagggtgtaccgcttctctcctgattacaaaggtgagatcaaagctacaatgacacgtaccctgcctggcacctctcctgcccaaggacccagcctgtctctgcaggacttgcaggagggcaggaaatgccatgacatcaccagctccactagaaatatgggataaaaggagtggctgagatctgctgatcccctcctcactccactgcaaccacccagagccatggctccccgaggctgcatcgtaggtaaggaggacaggaccccattcccacctgagcccatctccaatctcagccaccaccagggctctctccctaccccaaactacacctcatccctgttcccatgcccagccaaatctccaggcgtgaattgctcacagcaattccccatccatagtgcccagatcagccccatccacagccctgtttcagtccctgagctgctcaaagccataccgagccctggttccacccagtcttcttctaaatgtcagtgccagtcatatctgtggctgtccactcaccccatcttccctttccctttcccacagctgtctttgccattttctgcatctccaggctcctctgctcacacggagccccaggtgagcccaggagtgtttgggaagctggaggaggggtacaccttccaggggaccccaggctgggacccacctgccactacctcctggatctcaccagctctgtctcctccagtggcccccatgactccttacctgatgctgtgccagccacacaagagatgtggggacaagttctacgaccccctgcagcactgttgctatgatgatgccgtcgtgcccttggccaggacccagacgtgtggaaactgcaccttcagagtctgctttgagcagtgctgcccctggaccttcatggtgaagctgataaaccagaactgcgactcagcccggacctcggatgacaggctttgtcgcaggtgagtcctgtcccctccgtgggattgtgggtgcagggtagctgcatgcctgttctgccctgggtggagcccccattctccttgtctccctgtctctgccccctgcttctattcaatccacctctccctttccctacacctgtgtctccatccatttttatttccctctcagaatctcactctctctaccccgctgtcctctcctcctggctctcctgtcctcatttctgcccatgttcagtctcgcccccatctctggccatctctgtcccgctcagtgtctctctctgtcactatctccagtgtcagctaatggaacatcaggggaacgatgactcctggattctccttcctgggtgggcctggagaaagaggctggtgttacctgagatctgggatgctgagtggctgtttgggggccagagaaacacacactcaactgcccacttcattctgtgacctgtctgaggcccaccctgcagctgccctgaggaggcccacaggtccccttctagaattctggacagcatgagatgcgtgtgctgatgggggcccagggactctgaaccctcctgatgacccctatggccaacatcaacccggcaccaccccaaggctggctggggaacccttcacccttctgtgagattttccatcatctcaagttctcttctatccaggagcaaagcacaggatcataataaatttatgtactttataaatgaatgctgtagaattcatgaattagagagcttggactgttgaaaggggtcacagagggtgacgtggggccccttctctctgtcaccctgaggcatctgggcctttccatttgttctgttcgtgcacacacttattttctctttttccatttatttttaaatttattattttgttatttgtgctcggtgactaggaccctggccgcacctgggacaggggccaccctcctacaccagcctccaccaccccatggctccctgaacccagtcacaacatcgggagcagcccaggtggggtggggaggaggtggggatcgcgagagggcttcggagaggcactccctctcccaccagttctgggacagaacaggacccggctgtttgttcttgatgtacgttaaggagatgcagacagactgggaaagaacggaggttctttctccaactggctatggggagaaggtcagagtagcttaccagaccaactcaaagctacaaacttctttttctagtgcttatatgcattctaagctccacgcctatgtgcggagtgcacctgcaagacagcgtgtttcattcttatcaatatctaatctttaactagtgtccagggtctggaaagctttctccagagtcttggaaagtttcttaatcttaaatggaccccagtatgaggaatatgtggaagaatgctattattatttgatcagattttagggtctgagaaaacccagctggggttttaatgggcttgttttctcattcccgccctcatccccaggcactagtttatccagttctataatgtttaaggtatgcattcatcaaaaataaagtttagtggaaactgactcttctggtcgctaacagaaacctgatctgccacacacccatcccaggcacgcgtcccctgggatcgtggaaaacccactgggcaggtccaacgcccagagatgccacacttagtctgactttgggccaaagctggagcctgagagggagtgggtggggcggggtgtggaggatgtgggctatggaggagccctcgggtttggaaggaggaagcaaaggctggccaaggcacctgaagcacattcttcaggccctgtgccagggacaaaccctcgtggccagtgctgatgtggaatagatcgcagggagggggccacgctgctgcttacccaacccagaagcaggttccttagggagcgttcagccctagggtctccaccaacctggattccccaaagtcaaagaagccaccacctttctgggtcctgtttctcagggccagggggtctgcacagggcctgcgtccctgggcctcagtcatccgaggccaacccaggctcccggactgcccgatggcttccctgggcagattctgactcaaagggttccatcatcgccccacagttggcagcctcgcctcagtggccccagacgggcccggtggccaggtgtctgcacgtgcgggaactctggacccggcacatcaccatggcagcaatctggcatcacagggcaaatgccctgtctcacaggcctaaccctagctcagggcctatcagtgggagcacacccaatgctgggtgagctctgcctccccatgctaggattctgcagggcgtgagagctgtgctggcgcctagaaagcgacagacccaccccacccacggggtggctgcttcctcatcctccacagtgagcgtcctaaaccttcaccctgtccacatgtgactctccttgcctgcactccccccaccaccccatgaaatgatctcatttggtcatttaagtggaaaactaaaaagttttaagtgactccgtgagagcaggagagaggcgggtctcccagctcagaccccgccctggacgcccccactgaagccgcacagcaggatgtaggtgcccaaggcacctacacgcgccgagaggcctcgctcagccccgcccttcttaaacctggaatcctcaggtgtctgggtcctgccccatacaggccccctagaccactggtccagatccccaaccttcccccaacacgaggtattgacatcaaagcatcacctcatctggcacaagaatctgaaacacagaccgcaccttacaccaatgtagtgaatccctccttggatctcagtccaacaagcccagagtcggggctctgggttcccgcccaaatgccacgtgtgcgcacagaaggcacctgacgtcccttctaagggacaggaatctcaggcatcccagaatcactaggtctgatttaaatagcgtcaaataaattggaaaagaatgaaagtgctataaagttcggctgaaattttcagaggttttattggttgtatctggtggagagagtgggcaagtcttctctgaacatccatgaggacgaagaacagtcactgaggtgacggtaccaagtcaccggccacctcccagggatcctctcatccggtcctcacagcagcgctgcatggtcggacctcatcacccacattccaccaagaggaagctgaagcccggggccttcatccactcatgtcctccagacccctggcacccatcctgggccccaccccatcatccaggccttgggccttcgacctggggagagtccctgtctcctccatgagccgccctgggcctgaagaggtatccaataaacaagaaagcagaacacaaagagctgtgatggagtggatcttatgtagtaagaataaacttattttgagaaatttctgggtcatgtatttacccacagaaaaacagaagcaaacacacacacacacacacgcacacacacacacacacacaccacacaggctgtcacgtgtcctaagcacaaagtgccttgagcaaggccattgctggccccacacttatcctgactgtgatcttgctgtgatcagcacatcccatcagtgtggcaacaggtgtggccagagtgggaaccaggccttttcttcagatttgctctttgttcctgaatagccaccgtcagaacagacaccctcctagaagtcacttgattaaaaatttccttttggatatttaggttgatgttttatccatcggttaaagtataaatgtatatttattataaaagtgtaattatggctctaattaatgattatggtgaattttaataactatagctatgaaaatattccaatagataaaaacagtgctaaaatatacagttaatataagagtgattactttaagataaatcttgtaatttttgatctaataaatcttcataaaatatacatgatcatgaagcacatcaatagaattaatcctaatatttatagcaatacttggcgtgctctctctcataaaaaataacattaatagtaaaaaaaaaaaaaagaaacaaagaaatcggctgggcatggtggctcatgcctgtaatcccagtactttgggaggctgaggcaggcagatcacgaggtcaggagatcaagaccattctggctaacatggtgaaaccccgtctctactaaaaatacaaaaaaggagccgggtgtggtggcgggcgcctgtagtcccagctactcaggagctgaggcaggagaatggcatgaacccaggaggtggcgctggtagtgagctgagatcatgccactgtcctccagcctgggcaacagagtgagactccatctcaaaaaataataataataataataaagaaatgatgaaatttaaaaattctatttaattttgggttgtttaattttcatttggggcatgactatgtgaagtaataaattttgtttgggcattaatatgggatgacctatgtctcccgcaaaattcatgtgttgaagtcctaaccccagtatctctgaatataactgtatttggagataaggtctttgaaaaggcgattacggtaaaatgaggtcatatgagcaggacctaatccaagctgactggtgtccctataagaagaggatattagggcacagacacacacacagaggccatgtgaagacacagggaggagttggccatggataagccaagagatagaccctcagaagaaaccatcctgccaacaccttgatctcatacttctggcttccagaactgtgaggaactgaatttctcctgttcaagccacccctctggtgcccttgattatggcagtcctgggggattaacacaggcagaaggaaaatgaaggatgcaagagtcagagaaaggaagaaatcaaatgtactttctcctcatacaattttcaaaatttcagttactttaggaaaacactttttgggaaattattctaaactgggtgtttggcgttttattctaaactaggtgtttagtgactagatactttcttttctttcataacacatggtatctgattttctgggaaactttctatttgacaagtgtgtgatcagggatctctacatgaattctccacagaaagactgatctcatggatctagaatttgcagtggttcttgtgattagatacctgaaggaaatattgctcttatgtgacattaaagaagaaaaatatgacacttacggcaagtaaaaagacggcgtgtggttctatacgcttgtctggggcttttattgtctgcaccctttggcctttttgagttgccagcttctccaggtcctccagcttctcatgagttgcatctaggatatatgaggcaaaaaagaaaactcagggaaactccctgctctgccatttctgtggtcccaaggtcctcccttcgtctgccttcttaccctacctttctgagtcttcttatgcttgttttatagctgtactgagcaggagagatatggaaacatatgcctacctcgtctttctggaagcagaattccactcctactgaagggttttggtaagaacacatttgccagatcaataattgcctaccaaggatcaaacactgttttgatttgccccaataaagatacaacatctggcacagcatctgtggttggggcacagtctagctctggttttgaaaacttacaaatacctgcccttgtctgtgatacagtttggatgtttgtcccctccaactctcatgttaaaatgtgatctccaatgttggaggtgaggcctggggaggtgttttggtcatgggaggagattcctcacaaatggcttggtgccctccccatagtaataagtgagttctcaccctgttggtttgtgcaagagctggtaacaagagtctgacatttctcttgctccctgtcttgccatgtgacatgcctgctcttcctttgccttctgccataattgtaagcttcctgaggccctcactagaagcagatgcaggcaccatgcttcctgtatacagcttatagaaccacgagccaattaaatctcttttctttataaattacccagccttggtatttctttctagcaatgcaaatggactaatgtagtcgctttatgaggggtcagaacgtgaattgcatgaggacatgatgatagtgcccattatccctgaatttttcacatcatgcaattcaccttctgggccccatataggggaagtgattctggaaaatgtggttcccatctcagaagggagtgggtgttggggacaaggtgataatagaaagtctagcacagtccaccccattcaaagataagcatgtattgacacccattatagccattttcaacttcaaaataaaggcagcaacaataccattttccaagtaatgtgatgcaactatcagttttaccacccaaagacttttaatcttctctagagaagaggggtttgaaaatgcattgtccatctcccagatgattaacaacctctcttactatttcatactgtaaataccaagaatcaaacaatataaaccaatacttgatagaggagtatgaaggcattgagacaaacagcaacggaatcagttaacatagaaaatattcacataggccaggcatgttggctcatgtctgtaatcccagcactttgggaggccaaggcagaaggatcgcttgagtccaggagttcgagaccaacctgggcaacacggtgaaaccccatctctccaaaaaataaaaaaagaaattagccaggcatggtggtacacgcctgtagtcccagctactcagggggctgaggcgggtggatcacttgagcctcgaaggtaaaggttgcagtgagccgagatcacgcctctgcactcctgtctgcatgacagagtgagaccctgtctgaaaaaaagaaaaaaataaataaaatatgttcacctcaaagtgaggaagattatataaaagtccaacttagtccttgtttcagcagctggcctagaggctaaagctggcatttaaaaatttcctctttcaagccagacacagtggcacatgcttgtaattcccacgactcaggtggctgaggtaggaggctcacttgagttcaggatttcaagaccagcctgggcaacatagcaaaactccacccgaaaaaaaaatgtttttcactccattctataatctctttgctctcagcaaccacctcatctgattgtgattttttttttttgttttttaatgactatattgtcttctcttcatccttacatgaatcaccctctccctctctccccgaaaaaatcaatcattccattgttagaatgcagtttagggtctataaactccaaactcagtacataattaaaatttatatttgcactttgggaggccgaggtgggcggatcacgaggtcatgagatcgagaccatcttggccaacatggtgaaaccccatctctactaaaaatacaaaaattagctgggcatggtggcacgtgcctgtagtcccagctattcgggaggctgaggcaggagaatcgcttgaacctgggaggcggaggttgcagtgagccgagatcgagccactgctctccagcctgggtgacagagcgagactccatctcaaaaaaaaaaaaatgtatattcattgggaccttgaactcagtcttcaagttttacatgcagtaccattagtttaagttcagttgattcactgtctttctgtctccttccacaaaccaacctcttgcatcagatgttctccttaacttgcttagagtgctgccattttttgaatttttttccactttatcacctgaaacctcatttccatcttaagtaggcctcccatgcattgtctaagtatctccctagtaattcccaacattttcttgtcccaactgcagcctagttctctctttaatagaattgttttacatccctctcttgttgtagatatgatttctctacaactccatatatgaaaaagataaggtgaatagaggatattgtgagcaactcagtttcccttgccacttcccagattggtagtccaaccccttctctgtgtctattccctccagccatgctattctttatttattcttgtggcctccttgtatattcacagaggactttgctttgctctggttgtgatttttaacctggtgaaattacccacgtcttcattcttgaagtatatatgccattaggagtcttttctgtaatgaattgttatagttttcccatgttttactatgggacgtgggagttctaagaggcatcccacagaatgccttgtgtgagtggtatagttatactctcttctgcccattgtgtggtagctacccaattccccccttgataatcaggacaatttgccacttttggccattaggctttacacaatttcttctaccttagactatataaccattcaattagagccaggttaatgccttctacttccaaagtccacatctctggagtcaacagcaagaacattccctgccaaggactactccagatttctgcatgcttaacccaaagcaaaaataagaccttttgaattaagggtgtttatatcattaatcttcatcatatgcaatgttgagttttttttgcaaagcagattcctggttaaattttttcagagcatcaaattccttctggtgtaacaatatattatttgcaccaattttacctgtatagcaactacttttcattcttatcttataaaacttatcatttggtaaaaaaaaattctcacttttcctgaatttcctgttggttccttgtaatatcttccatctaggtctttcaacagggtgagtttcatattgataaggagttcaggaagggagttatcgaaagataaagtaagtgcactggcattttctccttgagaggctgggtaagtcaacaatagattagacctatggaatatgagaaacagcaggctgtccctacaaggtgggagactgttgacagctatgctgagcctaaggaaaagaagacagccatgaactgtgttcagaattaatttgccccgacagaaaatagaggcagggaaaatcaagatacagtactctggaatgtgcatttccatgtcattctcatgaatggtacagtctaactaagttcagtcattttctcagtacaaattctgattcttgctctctctggttgcatctacttggcgagctgccctgggcatgtcgtttagctatctctatttcgttttcatacctcccatacagtgccatggagtccttgtgtctcccttgtggccacacagaatgttcagacaatgagcttaatcacttgatttctactacttaaacagacaactcttgaaatcaatttggaatgttttttgctccaccaagtattgcaagacgttagcaaagatctcagctaggtgccctttattagaaagccatcatacaaatatttgaaaagattcaattctggcaattctggggagtcgtctccattttacagctgcttctctttacttggggaaggtataagtaaattacaccttccccgagcatctcagggagacactcaggggaatcccctctggcttccccgactctgtgttatcagttaagaagcgcatgaacattattatgcattgtgtaatgatatggtttcactgtgtccccaccaaaatctcatcttgaattgtagctccaataactcccacatgttgtaggagggacccggtgggagatcattgaatccttggggcagtttccccatataagacttattcttgcggtagtgaataagtctcgcgagatctgatggctttatacgtggtttcccctttctctcggctctttctctctttgcctgccaccacctaagacatacctttgctcttccttcgtcttccaccatgactgtgcggcctccccagccatgtggaactgtgagtccattaaacccctttcctttataaattaccctggtctcagctatgtctttattagcagcatgggaacagactaatacgtgtaatattgctatcggcatttatctaacaatgatatagctctaagcaggtgttctgtgttcttactacacactattttcgctacagtgaagctgtatacctgttgattccccatctggcccattgcagccagatttttctaccactggcaggctacaccttggctcactacaagtcaatgtgttttgtatttttctctagccatatatggtttcaaagatgtaggaagagtataggtggagaactggatttagataaggctgtggttttcctaaatgagtcttaccaaacagtggggagacaaaggacaatggaaatcagcaggctgtaattataatgattaagcaaggaatctaaggtagataaacaagtgttatgaaagccgtcttgaatcagaagtcaggctggtcgcggtggctcatgcttataatcccagcactttgggaggccaaggcaggtggattacttgaggtcaggagtttgagaccagcctggccgacatggtgaaaccccgtctctacaaaaatacaaaaactagctgggcatggtgacatgtgcctgtaatcacagctacttgggaggatgaggcaggagaatcacttgaacccaggaggtagaggttgcagtgagccgggatggaaccactgaactccagcctgggcaagggacccagactccatctcaaaaaaaaaaaaaaaaaaaaaatggccgggcgcagtggctcacgcctgtaatcccagcactttgggaggctgaggcgggtggatcacgaggtcaggagatcgagatcatcttggccaacatggtaaaaccctgtctctactgaaatacaaaaaattagctgggcgtggtggcgcatgcttgtagtcccagctgctcgggaggctgaggcaggagaatcgcttgaacccaggaggtggaggttgcagtgagctgagattgcgccatagcactccagcctggtgacagagcaagactccatcaaaaaaaaaaaaaaaaaaaaaaaagccgtcttcaatcagaagtcacatatgaagagataagaattcaaaacatcttagaattcacattccaaatagcttaaatggaactgggttattaagaaagagggctagaaacataaaatgtactaatgaactcatctaaataaaggaataatgtggttaacaaggcaggctatttcaataaaaaacaattgcctgaatggccaaatctgttgcctgggcaacagagcaagaccgtgtctcaaaaaacaaagcaagcaaacaaaacaagacctactcaagcccaatcctatctctaaaacaattctgtgcccctattctctccttgccagtcttccttatcttccttcctccttcctaatcaccttaatcttaatcatggttaatctttaacagctgctccatccttttcccaaccggtaaacttcaccacattcttagaatcctaaacgacgttccccccattcctatttttctgagagtttttatcatgaatgggtgttaaattttgtcagatgcttcttcagcatcaattgatgtggtcatgttatttttcttcttttgcgtgttaatacggtgcattccattgatagtgatttttgaaatattctgccaggcctacattctagaataaagcctaatagtcatggtgtgtaattattttttatattgctgaatttcatttacaaatattttgtcaagaatttatttttcttttttttaaaaatggagtctccctctcgcccaggctggagtgcagtgatgtgatctcggctcactgcaacttccgcctcttgagttcaagcgattctcctgcctcagcctcgtgagtagctgggattacaggcgtgcaccaccacacccagctaattttttgtattttcagtagagatgaggtttcaccatgttggccaggctggtctcaaactcctgacctcaggtgatctgcccgccttggcctcccaaagtgctgggattacaggcgtgagccaccgtgcccaaccaaggatttttgtatgagggatactcatctatagttttattgcttggttgttgtcattgttctttgtctttttatggttttggtaacagagtaatttgatttcacaaaataaattgggaagtattccttcctattctattctctggatgagatggtacagaactggtgttaatttccctttaaacatttggtagatcctcaagtcgaccatctgggcttggagatttcttttttaggaaatattttaaattctaaattcaatttccttaatagttataaggctactaaaatgatatatttcatattgggtgtgttgtgctcatttgtgcttttaagtgggtggtccatttaatctaagttgtccaattgtgtagagttattcctagttttccattattaatcttttagtgtctgcaaaacctatagtgctatctcctgtctcattattgatattgataatttgtgtcttctgtttttgatagttttgccaaaaatttatacattattgatattttgaaagaattaactctttatttcattgattttctatactgtttttctgttttcaattttcatgacccctgctttcctctttattatttccttccttctccttgctttggtttattttgctctcttatttttttctaggttcttgctgtgggagcttagattattgatttttcctttccttccttccttctttcctttctttccttttctttcctttcctttcctttccttttctttcctttcctttcctttcctttcctttccttttctttcctttcctttcctttcctttcctttcctttcctttcctttcctttcctttcctttccttttctttcctttccttgtcttgtcttttcttttctcttcttttctttttttcttggagtttcactcttgtcgcccattctggagtgtagtggcacgatgcaacctccgcctcttgggttccagcaattctcctgcctcagcctcccgagtacctgggactacaagcacccgccaccatgcccggctaatttttgtatttttggtagagatggggtttcaccatgttggccaggctggtcttgaactcctgatcccaggtgatccacctgccttggcctcccaaagtgcagggattacagtcttgagccactgtgccttacctgattgttccttttttctaatacaactatttagtgcaataagtttcacacttagcactgctttatatatgttccacaaattttgatatattgtattttcatttcattaagttaaatatacttttaaaaatctttgagactcatctttaaaccatgagttatttagagttgtgttgcttagcttccaagtgcttggagatctttctgtaatcgttagtttgatcaaattatggtcagagaacacactctgttaaatttcaaaattttagaacttgttgaggtttgttttatggctctagatagaagtcaattctccattaccatttacaatgacatcaaaaataacaaatacctagaattaaatctaaagaaaggtgagagacctctacaaaactctgctgaaagatgttagagaagacctaaacaaatgggaaataaaccatatttatgctttggaagactcaatgtaataaagatgtcaatgttccccaaattgatctatatattcaaggcaaactcaacaaatattacagcaagattttgtataagttaacaaactgattctaaaatttatcagaaaatgatggccaggtgtggtggctcacacatgtaatcctagcactttgggaggccatggcaggaggatcacttgagcccaggagttcaagactagcctgggcaacacagtgacaccctgactctacttgcacaaatttaaaaaaaaaggatcagaaaatgaaaatgacagaaaatgaaaatgacaatacaatattgaagaaactaaacaaagttataggacttacactaacagatcaggaatttttatgaaattataataatttagggtgtggtattgtataaggtaaacaaatttatcaatggaaaaaaacagagttcagacacagatccacacatagacaatcagtgatttgtgacaaatgtaccactacaactcaccaggcagacattagtccttttaatagatatctatatggggggaatgtatcttgacccttatgtcacaccaaatgtgaaaattaatttgaaatggatcatagacttaaaagcaaaagatttcaaactataaagcaggatttccaaaagccagtgtgaagagcatgggcgccctcctcccagcaaaacaaccatttaactggtgaaaaaaaatttttaataaaaacaactaattaagtctctggaaattgtccttagggcatatcgcaaacgaagaaatgtttattcaagaaattctgttagccaggtgcggtggctcacacctgtaatcccaacactttgggaggctgaggagagcagatcacctgaggtcgggagttcgagaccagcctgaccaacatggagaaaccccgtttctactaaaaatacaaaattagccgggtgtggtggcgcatgcctgtaatcccagctacttcggaggctgaggcaggagaatcccttgaaccttggaggcagaggttgcagtgagccaagatcacgccacagcactccagcctgatgacagagcaagactctgtctcaaaaaaaaaaaaaaaaaaaaagaaagaaagaaaaagaaaaagacattatactcaatctgtaaacagcagcaagagtctgagggcatttaagccacacattactcctattccccacatccccagccaactctgtaattgaagctctattatggtcagtcacagtcaagaaaatgggactccacctctccccagctcccagcctagggctacagtttcagttcagaaagggcagtgcaccagcatcttttatcctgctgtctccatgttgcggatgtgctatattagttagaaattgtggcttgcagcaccggggctccttctcccatccagcccctcctcctagcgtggaagttccacgccaggtttagcaggtcaagcacactgggcttcactgatcctgcctgagttcactcatggggcagaggttccacacaagaaagggcaaaccgagaagacgaacagctaccaccccctcccagtgttctagctgtagaggaaagacatcaccgcaggagaagctagctgctgtccctgacaccagctccagtccagcggctcagtggttctgcccgggggagagggaggccatcagaacagagagctccacaagtatccctaaaactggctttacttgaaataagagtgtggagaagttgatgcttaatgacattgaaaaaataaaaaaggaaattttggtgctgaaaaaccaaaaaagggcttgcagtagcaacaacaaacaaaaagacaaggcagaagcttaacagagataatcagaaaaagagataactaagaagggccctcctggagtgagagacagcctcaaaccctggcaacactctgacttggcaaagaagctagactttaatcagcccacaaaatgatttatgcattgtgctataggcctattaaaaagaatagagcaatcaattaacaataagaggagtctaacagatgcaagtgataccaacagaggcagacaagccagaagcttaacagaaacatcaaggaaaggacagtcaaaaagaggccagcttatgccataactatctggagtagttagagagacagtgcgtatgcttagggctgcaccctctggagagcactaagaaaggtataattgttcatatgtaattatgtaattattacttgtatgcatgttatataattattgcttatatgtaattgtgtaattacttataaaaacagcataatcgcttatttcttaccctttctccccttaactggttttaaaagtcatggcatgaaacaatatgtatgtaattgtattgctgggaaaaataaagaatctgatttttaaatgggcaagaggtctgaatagccatgtattaaaggaagacatacaaatagtcaacggatatatgaaaaaatgttcaacaacacttatcatcagggaaatgcaaatcaaaaccacactgagatgtcccacttcggttaaaatggcttttatcaaaaagacaaagaataacagatgctggcaaggatgcagagaaaggggaatgctcatatactggaaatgcccctccagacccagacagtaaaatttacaaaacatttagagaagaattaataccaatcattcacaaacttttcaaaaaagtcaaacagaactttccaatttactctgaggtctgtattaccctaacaccaaaatcaaagatatcacaagaaattaaaaagaaaaaactacagaccaacatctcttatgaatataaattcaaaaatcctcaacaaaatatagcaaaccaaatccagcagcatatataaagaatgatatatcagccgggcacagtggctcacacctgtaatcccagcactttgggaggccaaggtgggtggatcacggggtcgggagatcgagaccatcctggctaacatggtgaaacctcgtctctactaaaaatacaaaaaattagcccggcatggtggcacgctcctgtagtcccagctacttgggaggctgaggcaggagaattgcttgaacccgggaggtggagattgcagtgagccaagatcgtaccactgcactccagtctgggtgacagagcgagactccgaaaaaaaaaaaaaaaaaaaaacaatgatacatcatgaccaagtgggatttatcccggggatgcagttggttcaacataagaaaatcaatcaatataatataccatattactagactatagaggaagtcacgtaattctctcaaatgatattgaaagagcatttgacaaaatctacactctttcatgataaagtacaaagaacaaactaggaacagaagagagcttcctcaacctgttaaagagcatctacaataaactcatagctaacatcatacttaattgtgaaagattgaatgctctccccctaacatcaggaacaggataagtatattcactcttaccactctattcaacatagctctggaggttcaagccaggaaagttaggcaagaagagaaaatgcattcagattgagcaagatgaagtaaaatggtttctatttgcaaatgacatgatcttgtatgttaaaaatccttagggccaggtactgtagctcatgcctgtaatcccagcattttgggaggccaagtggggagaatcacttgaggccaggagtttcaagccaccctggtcaacacaatgaaaccctgtctctacaaaaacaaaaaataaacaaaattaaaaaattataagtacctgaggtgatagatagcgtaattaactggatttaatcattcaacaagttaagcctacattaaatcatcacattttacccaatgtgaataaacaattattctttgtcaatttcctaaaaaaattcctagcagaaaacgtggaagtaaatcttgatgacctcaagttaggtaatattttcttagatattacaccaaaaacacaagagacaaaaggaagaatagacctcatcaaaaattaaaaacctatgcactgcaagcatcaaggaaatgaagacaatccacataatgagagaagtgtttgcaaatcatgtatttgataagggatgagtatccagaatatattttaaaactcttacaactatataataataaaataagcaacccaattaaaacatggaaaaaatctgaataaacttttttcaaaaaggaatacaaatggccaataagcacatggaaaagatattcagcgtcattattcattaaggaaatgcaaattaaaactacacaggatatcatacgcacccacccagatgactgtaataaacaggaaaatagaaaataacaaaggttgaagaatctggagagaaatgtgagccctcatacactgctgatgggaatgtaattgatgcggctctgtggaaaacagtttgccaattcctcaaaaacttaaacagaattaccatgtggcgcagcaattccactcctacatgtacaccccaaaataattgaaaacaggttctcaagcaaatacatgtatatgtatgttcataacagcactattcacaacagcccaagtgtccatcaacagatgaatggataaatgaatgctgatacatggatacaattgaatttattcagttataaaaaggaatgaaatactaataaattctacaatggggatacaattgtagaaattgtaacaatgaaaacaataaacaaagtaaaaaaaaagaaggtgacacaaaagttcacatatggtgtgattccatttatatgaaatgtcccagataggtaaatccatacagatggaaagccgactggtagttgccaagggtgagggtagaggggaaggggaggaacagctaagtaggcatacagtggtcgggggctgtggagccaggtgactcggagctaaaaagcaattctggaagatgactgagctactcttctttcaacttgagagaggaagagaaggaaggagaggagggaaaagacagggaggggaagagaggagagtggggcagtggagggggagagagagagagagagagattgatggttgcgcaaaaagaagctagtgaacacagcaggcattgctcaccttgatggaatacacacaacaaaactctgtccaccgcctgggctgcccttacttgagcacactcctggggtagtcaggcctcactcctgggacatggagcctcactactgcctggtgctgagagcccaggggctccagtcagcagtgctggaagcagggccagaagtgcagttaggaccacagagctgggtcttgttcaaggacaggatgatccccttattacagccccaagagattgcagatctggtctccactctggagtgtcaactggcacaaccacagtccaatatctggaagagtcagagctgatgagctgacaggggacctctgggagcccccaaccctatccacagtgctataatcctccctcctctcttctccctccgctcaccacaccccttctcatctgtggtcccttctgagtctgagcccaggagttcaaaaacaaagatcagctgagagcagaaggagaatgacaatgtttctggggtcaccggatcatgatcattggggcacaagatgatgtctctgagtttctttggttgctgtaacagctcacagtggattttgggactgactctggatgtaggtcctggggactgggcttggcaggtgaggaaatgcagggagggctctggaaagggttaagcttctggaatttgcaggtggggagagagattgcaatgcagtcagagaggacacgggtgattatgaggtgggaaaccgagaattaaacagaaaagagaaaattaagtttgaagttcagaggtaccttagggataacattaggcattagctcagcttggggctggggatgacttaccgaagattctgggcaccatggtttaggcttcagagcagcagatgagagagcagcagtggaaatgggtcagtgactttacacaggagattattatagggtatgaacttacccatatttagggaggtgtgcagaaggagtggtttcttaaaaagggtggggcatgaaaagccacagaaagcataacaaaataaaagcattgacacattagtaggatgctactggacctgttccagggctgtcatgttctcagacagctcaaaactcagggcatgaaggacattttctccggtattcactgtgagaacctcatagggttcctggaggtaaaactcttagaaaagtgcagaggctccccttagactgggccccctggaatttttaattctcagattgctccaccctgagcctccaggaattcattcgttagacttcatgttttcctatcctggtactggttcccacaggggtttctggtcatgggtttctgttgcagtagttttgattctctgtatccacctgcctgtgtcaacaaatcttagggcagtggtttgccctgtgaccccactcctctaatggatataagaagaagtgttaattgtttctttgttcagtattcactttctgttaagatggagtgatgagttccaagtttcttacatgcttgactggaaactggaagtcccagagaacatttctttagagatgaggtctcactatgttgcccaggttagacttgaactcttgggctcaagtgatcctcccacatcagcctcctgagtatctgggattataagcatgtgccatagcaccggctcaaaaacctacttttaataatgttcatcctctgcaagctgagactttctttatgacccaacatatgtgtggggttcccagtttacatgatatttacaaacacgttgactttactggatgcttatacgtcctcatttcattgtgcttaaagaggaaactgtagctcagagaggttaagtacgttttgaaatgccacaactagtaatggtaaacctgggtccctaaagtcacgagagagaattatgagagtatgataggaaacttcaaaggtaccgaaggcagaaactgctaacagcattggtctctgaggagtgcaaacgagcaaatgaggggggaggtaaaaggaggggaaggagatttttatttttaattttcaaaaaccatgtgctgaaagttttatgctttgcatgcatatctctaataatttagggtgaatttgggttgggcaaatacccaggagagtgaccaatggcaagacaagacaatgagagaggtaagcgtgagtcctatgggatgcatagagtgagtccttaattctctatcagtgagggaagttggaagcagggtgggaaggttgggagaaagagaaaccctgaagggaactaagttactgggagcaggtgctggtaggtgagtcatgctgtggaagcctgtttgcactgtttcaaggagtgactctttggttggatgaaaaagggacgccgtgggtgtaggtagagaaggtgctggaggggaaggcaggcccaggtagcaaagggccttgtgggacaagctgggagcctgggtttcatcctagcggtggtggggagtcgttcaataatttttttggttttttcttttcttttcttttcttttttttttttttgagacagagttttgctcttgttgcccaggctggagtgcaatggcgccatctcggcttatcacaacctctgcctccaaggctcaagcaattctcctgcgtcagtctcccaagtagccgggattacagacatgcaccaccacacccagctaattttttttaatttttattttttgtatttttagtagagatggagtttctccatgttgatcaggctggtcttgaactcccaacctcaggtgatccaccctccttcggcctcccaaagtgctgggattacaggtgtgagccaccgcgactggccatcactcaataattttaagcagtgaaactcatgaccagatttgcattcttctaaaaccaggccccactctgtgatcctggcgtgtcttcccagacacccgggactatcacagtcaccactgcagcagggcagcgttttccagcacactattatcaccttgctcatgtgtttatttactttgcaaaaatattggtttgttagtgtcagagacaattccccatggatctcttgcttttttgctggcctggcagtgaggcattgactgtccttttgttccacactcttttcaaggatgtttgtgtagtgtactgccttggaagacagaggtaaggtttccctttagagcaaagaatacttgtttactgtcctgtataaaaataatactctcttcctccaggtcatttaggctctgataaaaccctaataatttagattctggtaaaatgctttctcttaatggcagagcttgttaagaagaacagaatactctggtgtgtttcacagcggttactttcccccttcccacttcatgccagaccatgaaggagatttttctcccatattcactgtgagaacctgatagggttcctggaggtaaaactcttagaaaaatgcagaggctccccttagactgggccccctggagtttttaattctcagactgctccgccgtgagcctccaggaattcattcattagacttcatgttttcctgtcctggtactggttcccacaggggtttctggtcatgggtttctgttgcagtagttttgattctctgtatccacctgcctgtctctcgaaatcttaagggcagtggtttgctctgtgatcccactcctctaatggatgtaagaattgttaattttctctttgttcagtattcactttctgttaagatgcagtgatgagttccaagcctcttacatgcttgactggaagctgggagtcccagagaacatttctttagagatgaggtatcactatgttgcccaggttagacttgaactctcaggctcaagtgatcctcccacatcagcctcctgagtatctgggattataggcatctgccatagcacccagctcaaaaacctacttttaataataatcatcctttggaagctgagactttctttatgacccatcatatgatcaatttagcataaatgtttaacatagacttgaaaaaaatgtatgttctaccactgatgagagagagatatttatatatttgcatatataaaattaggccaggtgtgttggctcacacctgtaatcccagcactttgggagtccgaggtgggcagatcacctgaggtcaggtgttcaagaccagcctggccaatatggtgaaacccagtctttactaaaaatacaaaaattagctgggtgtggtggtgggcacctgtaatcccagatgctcgggaggctgaggcagaagaatcacttgaacctggaaggcagaggctgcagtgagctgagacggtgccactgcactccggcctgggatattgagcgagacttcaacttaaaaaaaaaaaaaatttcttgcatttctatacactaacaatgaacaagccaaaaaggaaattaagaaaactacctcatttataataccatcaaaaagaataaagtgcttcaggccaggcatggtggctcacgcctgtaatcccagcactttggcaggctgaggcaggtggatcacttgaggtcaggagttcaagaccagcctggtcaacatggtgaaaccccgtctctactaaaaatatgaaaattagccgggcatggtgacgctcgcctgtaatcctagctactccagaggctgaggcaagagaattgcttgaacccaggagggggaggttacagtgtgccaagatcatgccactgcactccagcctgggccacagagcaagactctgtctcaaaaaataaaaataaaaaaagaataaaataattcagaataaacttaaccaagagagcaaatgacttgtatagtgcaaactacaaaacattgttgaaaaaaagtaatgaagacacaaataaatggaaagacagtctgtgttcatgggttggaagatttaatattgtaacaatgtccatactacccaaagtgatctacagcttcaaagcaatctctatcaaaatctcaatgacaattttgcagaagcagaaaaaatcctaaaattcgcatggactcttaagggaccctgaatagacaaaataattttgaaaaataaagaacaggccaggcgcggtggctcacgcctgtaatcccaacactttgggaggccaaggcaggcggatcacaaggtcaggagatcgagaccatcctggctaacacagcgaaaccctgtctttactaaaaaaaatacaaaaaattagctgggcatggtggtggccacatgtagtcccagctacttgggaggctgaggcaggagaatggtgtgaacctggaaggcggagcttgcagtgagccgagatcgcgccactgcactccaacctgggcaacagagcgagactccatctcaaaaaaaaaaaaaaaaaaatgaagttggacccttatctctaaccatacacaagaattagttcaaaaaactaatgagatccaaggcctaaatgcaaaagttaaaactataaagctcttagaagaatacatagggagaaagcttcctgacattggacttggcagatttcttggatgtgacaccaaaagtccaggcaaaatagtaaacaccaataaattgaactccatcaaagtcagaaagaagaacaaacttcagggccatgtgttgtgggcatttaccatgccctacaggaatagccacaaacttgatgattcacttttaggcaacagatctggttccttggttaaccagtccggtttctttagcttccttccttcctggaggttttcctattccgttgttaagtggggccaatgccaaaaagaaattagggcaatccctgctagagtatctatcaccttaatagatttcctactcctaccaattactcaggacgcagattctttgagaaagtttctcctccttccgagacaaaattttacacattaatatgtcttatgctacttgctgttgcacatatcactaattgaaatgatacattaatttgcataatttgctcatttctgtgccttcttctctaggccgtgagctccagggtgaaagactgaaggctcttcctccaagatcaggaacaagacaaagagacctgcttctaccactgctatttaacattgtactggaggtgctagccagaacctttagaaaaaaaaaaagaaaagaaaagaattaaaagcatccagagagaaaaggaggaggaagaagaggaggaggaggtgaaactgatgataaaaacccatccaagaatgtaaatgtgacatctgcagcaggttcaaatctaagctataagacaaacggaatccttcgtaaggactgtcatctattatgcacagagagccgaaatccattactgaaattctcttggtgagccacctgatgggcccagtgacgtactagtacacacaggagttgaaacaaaaaaaagtctggcatattctttggatgactggcagagtgtgacaccaatatggtacccagccctactatcattacaaggacttcatgaccaaaaaaataatagagaattgttttggtggttaaaacaattaaaagcatccaaattggaaaggaagaggtaaaagcatctctattcacagaaacataatcttatttatagaaaacactaaaccttccacacacacacaccccaaataaaacacctgttagaattaacaaacaaggccgggcgcagtggctcacgcctgtaatcccagcactttgagaggtcgaggtgagtgaatcacctgaggtcaggagttcaagaccagtctggccaacatggcaaaaccccgtctctactatatacaaaaaattagcggggtgtggtggtacgcacctgtaatcaaagctactcaggagatgaaggcaggaggatcgcttgaacctgggagacagaggttgcagtgagccgagattgcaccactgcactccagcctgggcgacagagtgagggtctgtctcagaaaaaaaaagaattaacaaaaaattcagcaaagttgcaaagtgtgaaattgacactcaaaactctattgcatttctacacactaacaaaccatgggcaacacagtgacctcaccctgtgtcacagggccaggtacacagaggtactgagtaaacattttagttttcattaagtggataaataaaaccaaaacctattatttaccactctcctttaacacctctctaaaagcagaaagagatacctccatgagggactttgtgacactttgggcaaaactaatgctggcactagtttggatgcatcagcgaatgctggacttctcacgttgaggattctccaggtgccctccttgggctcatttcttccatggagataaaagagaacagggttttttggggttttggttttgggtgttttttttttccagagacaaggtctcaactatgttccccaggctggatgaacttgggctcaagcaatcatctggcctctgcctccagagtagctgggactacaggcatgcaccaccaccatagccagctgttttttttttttttttttttttttttacataaatcctttctataataaacattgtccctgtgacagctagcgctcctcagtgttgtcaactaagggctcacatacgagccccatccagcctgtcatctcacatactgcatgaatccatttatacaaaatatccagaagagacaaattcgtagagatagaagactagtggttgctggaggctgagagaaggagaaaaagaggcgtgactccttcatggatacacggttcctttagggtgatgcgattgtttggaaatagtggtaatggttgcacaacattgtgaaagcactcactgcctctgacttgtacatttttagaaacttaatttgacattatgtgaattttacctcaaaaaaaaatgccattctggacataaggcagtaccagctttgccctaactcgtcttcacacagcactgcccaccttaccgccctctgcgttcttcacagtgttctaacccaactcccttcagagctctactgagatatcaccttcttagggcagcctcacataccattctctctaaaatagcatcagccatcaccctatgccttcataatatgtttcttcgtcatagaactattgccactggaactatccctatttctttcatttttggtggtttcttttttgagctagaagctcactccatcaccaaggctggagtgcaatggtacaatcatggcttgctgcagcctccatgcttgggcttaggtgatcctcctgcctcagcctcctgagtacctaggcaggtgccaccacacctagctaactttttaattttttgtagagatggggtctcactctgtttcccaggctggtgtcaaactcctggcctcaaacaatcctcccatcttggcctccccaaatcctgagattgcaggtatgggccaccatgcctggccttttatctttttaatttttgaaatgaccaatagaatttgagatgatggaattaacatcttggttcagtgctgggtcctcagatcccaaatagcagcaggcacaccgtactttctcagcaaatggctactaacttaattaaccaaactaattaaaggaggaaagtcatatgattttatacatatataattatgaataaagaatttgatgaaataccttcagcagaaatttctaatatgaaagtatgactaagtaaaataggatttttaaaacctttatacatttgaagatgtttattataaaccaccagaaatcatcatattattctccttaatatccacataagacagatatgtcttcttcaatctctattattcagtattactttggtgttgctaactatcgcaatacagtaacatgtagaaatgagttagagccgggtgtggtggctcacgcctgtaatcccagcactttggaaggctgaggtgggcagattacctgaggtcaggagttcaagaccagcctggccaacatggcaaaaccccatctctactaaaaatgcaaaaattagctaggcatggtggtggatccctgtaatcccagctactcgggaggctgagaaaggcgagtctcttgaacctgaaaggcagaagttgcagtgagccgagattgtaccattgcactccagcctgggtgacaagagcaaaactccacctcaaaaaaaaaaaaaggaaaagaaaagaaatgagcactggaagaaaagatattattatttttagacaatatgtttgtatatccagaaaacccaaaagatttgccttaaaagaagataaatggattaggaatatttaatattttgactgaatataaattaaatgtacatacatcaacagataatgttatactagcaataaccaggggaattgaaatgtaaaaaagtagagtattgcaaaaggttatgttacacaggaattaattgtatcaagaaatatgtaagatttgtggtaaggaaaccataaagtgatacttaagaacataaaactagatctaattttaaaaagtaaataaacctgggccaggcagggtggcacccaggctggagtgtaatggtgggatcttggctcactgaaacctccaactccaggctgaagcgattcttgggcctcagtctccccagagctgggattacaggctcacatcatgccctgctaatttttgtagtttttgtagagatagggtttcactatgttgcccaggctggtttcaaactcctgagctcagctgatctgcctgcctcagcctcccaaagttctggtattacgggcgtgagccactgcacctggccacttttttttttttttttttttttgagacggagtgtccctctgtcgcccaggctggaatgcagtggcgcgatctcgcacactacaagctccacctcccaggttcacaccgttctcctgcctcagcctcccgagtagctgggactacaggcacccgcaccacgcctggctaattttttgtattttttagtagagacggggtttcaccgtgttagccaggatggtcacgatctcctgacctcgtgatccgcccgcctcggcctcccaaagtgctgggatcacaggcgtgagtcaccgtgcccggccacctggccacttcttcattcttgttggctttgagtcaccagaaaaaaagtaaattctgcatccttatgtggcctattgaatctaaaattacttgttgactagtttcatcccttttcttctaatgtataatgtcacctttctcatatatcagtttgccattattagctttatctgttgatggactcctgccaggcaggagtgagcagctctgccgcacgggctggagaccccgccctcggtgctcagctgccactgcctcgtgacaacgatgctgaaagagcgaggttctgagagggaaatcaaaacagatggaggaagagaaacaagtggagggaaaaggagaggtggattgaatagaggcaaaaaaaaaaaaaaaagtaaataaacctctgggacgggaagtattaaacattttggtcattgttcccaaagccaaacaatatttacaaaaaattttcatctcaatctgcacttctaaattttgctatttttcaggaggaagctttagaaaattactttggagatgttaaagctaactgcacaaatattgtcaagtaaaacttgatagagtgtaatagggagagaagatttttttgtctcttattattattattattttgagacggagtctcgctctgtcgcccaggctggagtgcattggcgagatctcggctcactgcaagctccgcctcctgggttcaggccattctcctgcctcagcctcccgagtagctgggactacaggcggctgcaatcaagcccggctaattttttgtatttttagtagagacggggtttcaccgtgttagccaggacggtctcgatctcctgacctcgtgatccgcccgcctcagccttccaaagtgctgggattacaggcgtgagctaccgcgcccggccttttttgtctattattaaaatttgaaacaacgccattataaatgaagatgacactacctagaggtgggagggcagagacagacagacacggagaatggggactccacccagtgcagaacaagtatgcagcgccccgctcccctgcacccacaatgccatggagaggaccggatctcacctacgagaaagcctgtcacccgaggtcagggctgaggagcacttctggcctttcgtcttcaccatgagggacgcctgggagctgagggaccggggcagcactgctcgaagcgacactgaaggtgcagtttccacacttctgggtcctgcccaagggcacgacagcactgtcatagcaacagtgccgcaaggggtcgtagagcttgtccccacttcccaaatgccgctggcagagcatgaggtaagcacttatggggccactggaggagacagagctggtgaggtcagatggttggtagatgggtcccagccgggggtcccctgggggccacactcatcccccagtttcccagtccctcctgggctcacctggggctccgtgtgagcagaggagcctgaggatgcagagagaggccaagactgctgtgggagagggaaggggaagagggggtgatcgggaaaccacaggcgatccttggaagcccagcttggggaaggggggctccgagggagtttctgccctgactgagactcagggaagggctagaagctgaccttgccctgccttcctgcagacacacgctgggccctggggtgagagaggtcccagacaggggatgtgtcgtggtggatttgatgccaggtcctttgagagccaggagaggaccgatgctccctccaccctcaatctctctgtggtcaaggggtgcaggcaggactctcggaagaaatgggcctagggttcagggcaatgtggttgtttcctggttttggaggagctcagagctggggctcagctggggtcagggagggaaggggctgcgctgagactggtgttgtgctatgggtgtgactggcaccaacatttagaaaaagatggggctgggattggaactagcgctaggcaagactttggggagtagtttggggactgaaatggctgtggatggggctggcccgggggctatggatggggaattgctgtgatggagccatgtctgaggaggaggccgggcatggggacagggatgaggtgtagtttggggtggggagtgagcctcggtggtggctgagatgggagatgggctcgggtgggaatggggtcctgtcctccttacccaggacatggcctcgggagccatggctccggggtggctggaggggagtgagtgggtgatcagcaggtctcagcagctccttggctcctatactcctagaggagctggtgataccgtgggatgccctgccttcctgcagagacatgctgggccctggatcgagacaggtcccagacagggtatgtgtcatggtggatttgatgccagatcctttgagagccaggagaggaccgatgctccctccaccctcggtccctctctcctccagaatggaggcttctttggcaaataggaaattgcaggacactcctggggttgtcctcaccctcccacactcacacagccacagtcttacagctgaccctgtgagtctagagctgagacatgcaccgaaggttgctgtatgacctggtccccttctagacgtgaatcagtgcgagggcccaggacagcagaagaggtgtgaggccatcctgtgacaagggagccacagggtgtccagacccagcgggagccgaggattcaggaaaatctccccagtcagctccagaggtgcccacagtgtgagctctagtgtctcccaggtagaggccaaagcgtcacctgcccggccctgggggtggaagtggagtagacggcactcctatctgggcaaccgagtaagaccctgtctctgaagaagtacatacatttacttagactcctctgtctttgtcatatatatacatatatgacatatatgagatatacatattatatatatgatatatatatgatatacatatataaaatgtcatatatatgtgtcatatatatatgacattttatatataggagctcaagaccagcctgggcaacgtggcaaaactccacctctaccaaaacatacaaaaatgaactgggcacagtcgcacacacctgtagtcccaactactcaggaggctgaggtaagaggatgacttgaacccgggaggcagagtcgagctgagatcgcgccactacctgccagcttgggtgacagagccagactgtgtctaaaaacaaacaaacaccagaaggcagtgatttttgccccaaagtgatttaactctccctagtcattatacagaacaagaaaaataagaacatgaattagtctgggcgcagtggctcacacctgtaatcccaacactttgggaggccgaggcgggtggatcacttgaggtcaggagttcaagaccagcctggccaacatggtgaaaccccgtctccactaaaaatacaaaaattagccaggtgtgatcccagctactcgagatctgggtagctactgaggcaggagaattgcttgaatccgggatgtggaggttactgtgagctgagaacacaccactgcactccagcctgggtgacagaacgagactccatctcaaaagcaaacaacaacaacaaaagaaaaagaagaagaaagtgagttgacctgtaatgtgagaaacggaagttgtaatcatatgtgactcagatcacagtcatatcacttaaagtgctgttatggttcaagtggcttttaaataatattgattttcacagtggtcagaccacatccctaccctggttaaccccacttcatgaagcagagcgtttggagggggaggatgggaggaggagagcaggaacccaaaaccctcacgtggctgctctgctcaacaaactggaaacaccgtcaacttattttgatacaaatccctatgacccatttttattcaagaattctgtcacctttggctgtttttctgaggtttctccatagcaccttatcctaaaattttctcttttttttaattttaattttaaatttttttttttttgagacagagtgtcactgtcgtccaggctggagtgcagtggcgtgatctcagctcactgtaaccccttcctcccaggatcctcgtgccttggcctcccgagtacctgggtttacaagtgtgcaccaccacacccagctaatttttgtatttttagtagaggcggggtttcaccatgttggccaggctggtcttgagctcctgacctcaagtgatccaaaccccctcagcctctcaaagtgattacaggtgtgagccaccatgcccggccctgctcctggaattttcttacagaatcagagcagacaccattcctagaggtaggaaactatctctgcaattggctgttctggaagccagaaacaaaggaccggccaggaacccatctcccctgacaattgtggaggagcaagttgaggactttcaggatccacaatgccaggcaggagggagcagctctgccacacagggctggagaccccatcctcgatgctcagctgtcactgcctcgtgctattaagttgccacatccttgatggtttaatgcccaactccagggctgcttgctctgcctgcattggttgattcttctggaaaaataaaactctataatattttgatccagggagcccaaggaccatcttcccagctctctcgaattacgacacaatcctcgtcctaactccactagattgccctggttaatggggtaattctgtgagaaaacacaggcgcatcaatattgcagtgtcccttacagaagcgctgagagtaacactattgctttagttggggtcctcatagaacaggtgatacctcatagaattttctagtgctttccaatacctcaattgatatcattcagattcggccgggcgcagtggctcacgtctgtaatcctagcactttgggaggccaaggtgggtggatcacctgaggtcaggagttcgagaccagcccagccaatgcagtgaaaccccatctctactaaaaacacgaaatttagccaggcgtggtggtgtacacctgtaatcccagctacttgggaggctgaggcaggagaattgcttgaacccaggaggtggagtttgcagtgagccgtgatggcaccactgcactccagcctgggcgacagagacagagtgagactccatctcaacatatatgtatacacacacacatatatatctcagatcctctagtgcaaagtcacatatctgtatgggagctccaataaattggaatgcagaggttaaaggttaatcagttagctacacctactaggaactttctctgttataaggggtggtgcccaccagggactggtcccatggccagttcccacatataatctaaccctgtatgggattttagaaggtgggaaacaaagcctggcacggtgactcacgcctgtaatcccagcactttgggaggcccattcgggcagttcacttgaggtcaagagtttgaggccagcctggccaacatggtgaaacctggtctctactaaaaaaaaatacaaaaattagctggacatggtggccggtgcctgtaatcccagctactcaggagcctgaggcaggagaatctcttgaaccggagggacagaggttgcagtgagctgagattgcatcactgcactccagcctggaggccaaggcaggaggatcacttgaggccaggagtttgaaaccggcctagccaacatagcaagtccccatctcaaaacaaaaagcaaaacacaatattttgacccaggcagtgtgaagggggcaggtggcatctttttgaagatgccagaaaatttgggacctccaaacttggacaatgttagcagctgtctgaggccacaaaattaggcaaaccacactggagaaagaaaatccttcggaaacctgttcatttaggcaactgtatgagtttcagctgaattttctaaatgcctctaaattacatcctcagcctggagggacatcagagctgatttgactcacttgtggggcctgcttctgagttattaacgtggttatggctcccccatgtggtggaggggggcatattcattttttaagttcctatttcagcccagcagggtggctcacacctgtaatcccagacctttggaagacccagcgatcgctcgagcccaggagtttgagaccagcctgggcaacatggtgaaagcccgtctctatttaaaacaaaacaaaacaatgaagttcttcctatttctctccctgtccttgacacgaggggattccaactactttttctgctaatcgtccttgtacatgagcatatatactgacaggatttttacctgtcccaaataatatgcctttggtcccatccccagacaggcagggaatgaacaggccatctgtgactctcggtcttgctctgtcgcccaggctggagtgcagtggtgtgatctcagctcactgcagcctcaatcttctgggctcaaatgatcctcttgcctcacccccccaagtagctagaactataggcccgcacccccgcgcctgcctaatttttttcttttcttttctttttcatagagatgggggtctcactatgttgtgcaagctagtctccaactccaggctcaagcaatcctcccacctcagcctctcaaaatgctgggattataggcatgagccattgcgcccaacctggatgttgagttttttttttttaagaaactgccaaactgtttttcagagcaatgtataaatgatccaatttatctccacccttgccagctttcaatggcgttgcggttttcaaaatttttagccattttaatttaatttgcgtttccctaatggctaatgatgttgaacatctttttatctgcttacatgtcatctgtatctcttcctcattgagatgtctcttcatgtctttaaaaagtttttattttcatttgattttttcatagagacaaggtctcactatgttgcccaggctggtctcgaactcctgggctcaagcaatcctcccaccttggttccacaaactgctgagatgacaggtatgagccaccatgccagatcctcttcaggtcttttgcccatttttttaatggatttttttttcactattgagttttcacagttctttacattttctagataattgtcctttgtcaggtatgtgctttgcaaatattttctcccagactatagccctatctgtccttctaactgggtttgttttttgttttttgttttttggggggtttttttgagacggagtctagctctgttgcccaggctggactgcagtggcgtgatctcgacccactgcaacctccacctccagggttcaagcaattctcctgcctcagcctcccaagtagctggaactacaggcgtgcaccaccacacccagctaatttttgtatttttagtagagaaggggtttcaccacgttggcgaggatggtcttgatctcctgaccttgtgatctgcccacctcagcctcccaaagtgctgggattacagatgtgagccactgcgcctggcctaactgggtttttcttagagcaaaagtttttccttttcataacatccaaactatcaatttttctttttatggactgtgcttcagatgtcaaatctaagaactgtttgcctggccctagatcctaaagatgttcttgtatgttcgtttctaaaatttttgtagttttatgtcttacatttaaatctgtgatccattttgagttagtttttatataaggtgtgagagaggagagaggttgatttgttttgttttgttttgttattcctatggatgtccaattgctcggcaccatttgttaataagctctcttccctccattgatttccctttgcgcttttgtcaaaaatcagccgggcccaggcagagtggctcacgcctgtaatcccaacactttgggaggctgagatgggaggatcacctgaggccaggagttcgaggctgcagtaagtcatgatcactccactgccctccggcctgggcaatcctgtctcaaaaagaaaaaaagttgcacatatttgtgtgggtctatttctgagttctctattctgttcctattctattattttctctattcctctgccagtaataccacacagtcttgattactgcagctagatgtctttaaattgggtagactgactcttgtcactttattctgggttatttatttatttatttatttatttgagacagggtctcgctctgtcacccaggctggagtgcagtggtgtgatctcggctcacagcaacctccgcctcccaagttcaagcaatcctcccgtgtcagcctcccaagtagctgggattacaagcgtgcatgaccacactcagctaatttttgtagttttagtagagatggggattctccatgttggtcaggctggtctcaaactcctgacctcaagtgatccaccagcctccgcctcccaaagtgctgggattacaggcatgagccatggcacccagccaattcttcttctttcaaattgttttacactttctagttgctttgccattccataaaaaaatttaggataatctagtcgatatctaaaaaaggaattgtgttcaacctgtgtatttatttagggggaaattgacatgtttactatgctaagctttctagtccatgtacatactataccttttcattcttttagagagtatttgatttattttatcagaggcttttacttttcaggatacaagtctggtactttttttttgtttcattttgattttttctttcctttccttctttctttctttctttctttctttctttctttctttctttctttctttctttctctctctctctctctcttccttccttccttcctttctttttcttcatttttttttgacagggtctcactctgtaacccagactggagggcagtggtgccatcatggctcattacagccttcacctcccaaactcaaggaattctcccacctgagcctcctgagtagctgggaccacaggtgcatgccaccacacctggctaaattttttttttatagagatagggtctcactatgttgcccacgcttggtacatataatattggatttacacctaaatatttcattgttaagcagttgtatttggtattgattttatctttaatttagctgtttatcactgatctataccaatgcaattgattttgtatgtttatcttgtctatctcaaccatggtgagcttgcttgttagctgtaggaggttttgtggtttttctgtcttgaggttttggttttattttttgttttttggtagattccttgggattctctatgtagacaatcatgtcattgcaaataaggacaattttatttcttcctttccaatccctgtgatttttagtcatatggtaactctatgcttaattgtttgagaaaccaccagactgttttccaaagtggtagctgaaacgtttcgcattccgcaggcaatgtatgaaggctctaatttttttttttttaattgagatggagtctcgctttgtcacccaggctggagtacagtggcacaatcttggctcactgcaacctccacatcccgggttcaagcaattctcctgcctcagcctcccaagtagctgggactacaggtgcgtgccaccacacccagctaattttttttttgtatttttagtagagacagggtttcactgtttagccagggtggtctcgatctcctgacctcatgatccgcctgcctcggccttccaaagtgctgggattacaggcgtgagccgccacgcccggccagaaggctctaatttatctacatcctcatcacacttgttatcattctcactttttaattctagccagccttgtgggtgtgaagaggcatctcattgtggttttgatttgcatttccttggagactaatgatgtcaagtatattttcattgcatattggctatttgtatatctttcttgaagaaatgtcaattcagatcctttgaccatttttagttgatttatcagtcttattattgaagtgcaggagtttttttctatattctaggtacaagtcctttaggagatacatgatttgcaaataggttttcccattctgtgtgttattttcacttttttgactgtatcccttgaagcacaagtgttaattctgacgaaatgcaaattatctatttttttcttttgttgttcatgtttttggtatcgtatctaagaatactgtattttatttttttgttttgttttgagactaagtctcactctgtcaacccagactggagtgcagtggcacaatcatggctcactgcaacttccatctcccaggttccagagatcctcctgcctcagcctcctgaatagctgggagtacaccaccacacccagctaatttttatatttttagtagagacagggtttcgccatgttgcccaggctggtctcgaactcctgacctcaagtgatctgcccacctcggcctcccaaagtgctgggattacaggcataagccgacgcgcccggccttcttgtttttataagtattagtcttcagctttccatcttctgtcaggatttattaaaagactcttagatatgagacaggaggatcacttgagctcaggagttggggaccagcctgggcaacagagggagacccaatctctattttaaaaaaaaatttttttttaataaattagccaggaatgatggcatgcacatgtggtcccagctacttgggaggctgaggtgcgaggatcgcttgggcctgggagttccaagtttcagtgagccatgatcacgccactgctcagcagtctgggtggcagaaagagatcctgtctccaaaaacaacaacaacaagataaaacaacaagaaaacatttaccagttttgtacccaagcgagttagagaaacgctacacttggagacaaattcaggaatcctttattagctggcgaccgagagacggctaacgctcgaaattctctcggccccgaagaaggggcttgattttcttttatacgttggtttagagaggggagggggggaatctagctgtaacaatctttcagaagtaaaacagataaaaaattaaaaagacaaatggttacaggagaacaaagtattccaggtgcaggggctttaaattcatcataaggtgataggcgtgagggctctgccggacacaaacacgggggctttatggcactatctcctgagcgaattcctgggaactacggacattgattgccacagtaccttatcagttaattggactctctgatatgctgagagtcagcttacacgagttaactccttgaggaagggggtcggtaaggagtcctggatgtcttgcaaatgaaggagccaaatggagtccgtccggttttctcagctaagggagagtctattcatattaaaacaaggttaggtattacaccaggacaacagcaataacatgaaagcattcttttattgaataaatactattcaagttctgtatttccatggattagttaattaaatcacaaaatcaccttaagatgtcagtctcgtaagaaaactatggctcagggagagagacagaaagagattttctaagtgctgtatggcagtgtgaggagtttatctctgcagggctttggcaacaaatggaaactggttctgttcggagatgggcaaccacggatgtacgctgctcagatcttcctgtaagaaaggaagcccactggccgggcgcagtggctcacgcctgcctgttatcccagcactttgggaggccaaggtggtcagaccacaaggtcaggagatcgaaaccatcctggccaacatggtgaaaccccctctctactaaaaatacaaaaaatcagccgggtgtggtgtcacgcgcctgtagtcccagctactcgggaggctgaggcaacagaatcgcttgaacccaggaggcagaggttgcagtgagctgagatcgcaccattgcactccagcctgggggacagagcaggactccatctcaaaaaaaaaaaaaaaaaagaaagaaagaaagaaaggaagcccactgtatgagtctgttctcacacgctataaagatactacctgaggctgggtaatttataaacgaaagaggttttaattgactgacagttctgcatggctgggaggcctcaggaaacttacaatcgtgacgaaagatgaagtgggaagcaaggcacatcttacttacgtggtggcaggagagagtgaggaggggaaactcccagacactgatgaaacaaccagatctcatcagaactcactcactgtcatgagaacagcatgggggaaactgcccccttgatccagtcccctcccaccaggtccctccctcctcacctggagattacaattcaagatgagatttgggtgaggggacagagccaaaccatgtcacccacgggtcagccacagagcatagttagctttactttagctgtaatgccttcaggatctgtcatagcctgggagaccagatcgtgcacttcctggccaatgacctggacatttcttccaaacgcaggactcctcaagtggaaaatctttgttgtgaagcaccctttgaggtttgccaagattttctttcagctctgaatcatagtctgagtatttttctgcccacctcagcttctctctgtcaagcaaaactgacatatctggaaagtaagaaaataaaccaggccacatgcagtggcccatgcctgtaatctcagcactttggaaggccaaggccagaggatcatttgagtcccagggtttgagacgaccctgggcaacacaggaagaccctatctctacaaaaaatgttaaaagttaaccaggcgtggtcaagtgtgcctgtggtcccagctgcttgggaggctgaggtgggaggatcgcttgagcctgggagttgaggaccagcccagcctgggaaacagcgagaccctgtctccacaacaaacaaaataagttgggtgtagtggcacacacctgtagtctcagctacttgggaggctgaggttggagaatcgcttgagcctgggagatcaaggctgcatagagccaagattgcaccactgagctccaacctgggtgacagagcaagaccctgtctcaaaaaaaaagaagaggaagaggaagaagagagaaagaaagaaagaaggaaagaaagaaagagagaaagagagaaggagaggggaggggaggggagggagaagaagaaagttccctcatctatcaagaaactggacctgccaaagagtaacacagttgccttccctgaaatttccttaaccctagaagattaaaattcacatcacaaggccgggtgcggtggctcatgctggtaatcccacactttggaaggccgaggtgggtggatcgcctgaggtcaggagttcaagactagcctggccaacatggtgaaaccccgtgtctactaaaaatacaaaaattagccaggcgtggtggcatgcgcctgtagtcccagctactcgggaggctgaggcaggagaatcacttgaacccaggaggcggaggctgcagtgagctgagatcgcactggagattggactccagctttggcaacaagaacaaaactctgtctcaaaaaaaaaaaaaagagaaagaaaaacttacatcacagagaaaaaggctgaaaataaaacaccacaactgaaagccaggcaaactgcatcccaaaccactgtctgctctccatcttattcaactggcaaagaaaattatttactaactttcactcgcatccgtgtgaagacaccaccaaacaggctttgtgtgagcaacaaggctgtttatttcacctgggtgcaggcgggctgagtctgaaaagagagtcagcgaatgcagataggagtggggctgttttataagatttgggtatgtaaaggaaaattacagtcaaagggggaggttgttctctggctggcaggagttgggggtcacaaggtgctcaataggggagcttttgagccaggatgagccaggagaaggagtttcacaagataatgtcatcagttaaggcaggaacaggccattttcatttcttttgtggtggaatgtcatcagttaaggcaggaaccggccatctggatgtgtacgtgcaggtcacaggggatatgatggcttagcttgggctcagaggcatgacatttctgtcttcttatattaataagaaaaataaaacgaaatagggttgaagtgttggggcagtgaaaattttggggggtggtatggagagataatgggcgatgtttctcagggctgctttgagcaggattggggtggcatgggaacctagagtgggagagattaagctgaaggaagatttttgtggtaacagttgatattgtggggttgttagaagaaacatttgtcatatagaattattggtgatggcctgggtacggttttgtatgaattgaaaaaagaacggaataagacaaggagaaaaacaggtattaaaggactaagaattgggaggacctaggacatccaattagagagtgcctaaggaggttcagcatagccctgccagcaaagattatttgtttactttaagagggagttaagagtggcagtttggggatagcaccaggagatatccgctgcgatggtttggagaaacagtgtaaaccagcagtgtaaacaagagcagggcatttatgagtagttgagaacggtgagtaggagttgactagacagaagatagtaaggatgacaagttttttggggcgcagtccaagttggtctggtgtctggaatgagactggggcctaataaaaaggattgtccatacaggagttcaaatgggctgtaacctgcagcatttcgaagacaggcccgaattctgagaagggaaagtgataaaagtactgtccagtcctttttaagttggtgactgagtttggtgaggtgtgtttttaaaagaccatcagttcactgaatactaagagcctgagaaactccttgggtgatttgactaataaaggccggtctgttataggactgtatagaggtgggaaggccaaaccaaggaattatgtctgacagaagggaagaaatgaccgtggtggccttctcagaccctgtggtaaaggcatctacccatccagtgaaagtgtctacccagaccaagacgtattttagtttcctgactcggggcatgttgagtaaagctaatttgccagtcctgggtgggggcaaatcctcaagcttgatgtgtagggaagggagggggcctgaataatccctgaggagtagtagaacagcagatggaacactgagaagtgatttccttgaggatagatttccacgatggaaaggaaatgagaggttctaagaggcaggctagtggcttgtactatagcatagcctgcctttgccggtgtgtggcgattaggcctggtggaactgccatcaataaaccaagtgtgaccagggtgaggaacaggaaagaagaaatatggggaaatggggtgaatgtcaggtggatcagagagatgcagtcatgggggtcaggtgtggtatcaggaataatgtgggaggccggattgaagtccgggccaggaacaacggtaattgtgggagactcaacaaagagtgagtacagctgaaggagccggggagcagaaagtatatgtgtcaggtgtgaggaagaaaatagattttggaaattatgagaaccatagagagtgagatgagcagagtttgtgattttgagggtctctaaaagtattagggtggcagtggccgccacatgcagacatgagggctaggcaaaacagtaaggtcaagttgtttggataaaaagggtacaggacgcggtcccaattctcgtgtaagaattccgactgcacagccctgtacttcggctgtgtgtaatgaaaagggttgggatgagtcagggagagctagggtaggagcagtctctaaagctgtcttcaaggaacggaaagaggagtggggaaaggatttaggatctatggggtcagctaggtttccttttgtgagtttatataatggttttgttaggatggcaaaaccaggtatctaaagtcaaaagtatccaaccatgcctaggaaggaaaggagttgttttgtagaaggtgttggggtttgagagatcagtcggacacgattggcagggagagcatgggtgtttttatgagaattatgccaagataggtaacagatgaggaagaaatttgggcttaactgaagtaatgggggctgtctgtgaagccttgcggcagtacagcccaggtaatttgctgagcctgatgggtgtcagggtcagtccaagtgaaagcgaagagaggctgggatgaagggtgcaaaggaagagtaaagaaagcatgtttgagatccagaataatgggttgtggagggaggtattgaggataggagagtatatgggtttggcaccatggggtggataggcaaaacaatttggttgataaagcacagatcctgaactaacctgtaagccttgtctggttttaggacaggtgaaatgggggaattgtaaggggagtttataggctttaaaaggccatgctgtagcaggagagtgataacaggctttaatcctttcaaagcgtgctgtgggatgggatattggcattaagtggggtaagggtgattaggttttaatgggatggtaaggggtgcatgatgggtcgctaaggagggaggagaggtgtcctatacttgtgggttaaggtggggggatacaaggggaggatgtgaaggaggctttgaactggggaaaagggcagcaatgaggtgtggctgtagcccaggaatagtcagggaagcagataatttagttaaagtgtctcggcctaataagggaactgggcaggtggagataactaaaaggagtgctttaaagagtatcgtctaagttggcaccagagttggggagttttaagaggtttagaagcctggctgtcaatacccacaacagttatggaagcaagggaaacaggcccttggaaagaaggtaatgtggagtgggtggcctctgtattgattaagaaggggacggacttacggtgcactgtgagagttacctagagcatctgtgacggtccaggaggcttctgagatgatcgggcagtgtcagtcttcagctgctaagccgagaagatctgggaaggagtcagtcagagatccttgggccagagttctaggggctctggaagtggctgccaggtgagttgaacagtccgattttcagtggggtcccacacagatggaacagagcttgggaggaatcccaggctgtgggcattcctttgcccagtggccaaatttccagcacttgtagcaagttcctgggggaggaggttctggaggaacccctggctgctgcggttcaggcatttggagttcttgcgtgctggagatgtggctggggtttctctcacagtggaggtaaggaattgcaactcagaaatatattgttacttagctgcctatactttattattgtacacattgaaggcgaggctaattaagtcctgttgcggggtttgagggccggaatttaatttttggagttttatttaatgtcaggagcagactgggtaataaaatgtatattgagaataagacggcctcttgaccttctagggtctagggctgtaaagcatctcagggttgctgtcaaacgagccatgaactgggctgggtttttatatttcatgaaaaagagcctaaacgctatccaatttgggataaagaaaaaggaacattaacctggactatgcctttagctccagccacctttttaagaggaaattgctgggcaggtgggggagggctagtcacagaacaaaactgtaagccggaccaggtgtgaggaggggaggtgataaaaggattgtagggtaggggagcagaggctgaggaagaattgggacctagctcagcctggtgaggagcagccttggggagaaggggagaggtcagatgggtctgtagaaaaggaagattggaaagaggaaagactcagcaatgcttggggttgggactgagggacaggcagcagggaaagaaggaagatttaggacgagttgcattgggaacagagactagggagggaccgatgtgtaaaagaatgcctggacatcaggcacctcagaccgtttgcccattttacggcaagaattatttagatcttgtaggatggaaaaatcgaaagtgctgttttctggccatttagagccattgtcaagttggtattggggccaagtggtgttgcagaagaaaacaaggggtttaggttttaggtcaggtgtgagttgaagaggttttaagtttttgagaacacaggctcagggagaagagggaggaatggagggtggaaggtagcccatagtgaaggaggcaagcccagagaaaagagagagtagagacacagaaggggtggggggtgattaccccccaggaaagtggagaaggggtagagacatggagagaaggggttggggggttcttgccccccaaaaaagtggtacttgctgctaagggtgaaggaccaaggcaggcatccccacatggtcagacacctctgaaatgtgggtgaataatcaggcaggcgtccccacacaattaaacaccaagggaagactgtcttcccgagtctgtgactggtgccggagttttgggttcacggataaaacgcgtctcctttgtctctaccagaaaaggaaaggaactgaaattaagagaagggagagattgaagtgtgaagccaagattgaaaggagaaagaggttgagggatagtgagaggggttggagaagagagtaaaaagagaccgcttacctgatttaaaattgatgagatgttccttgggctggtcagtctgaggacctgaggtcataggtggatctttctcgcgggacaaagagcaggaggacaggggattgatctcccaagggaggtcccccgatcggagtcatggcaccaaaatatttcactcgcgtccgtgtgaagagaccaccaaacaggctttgtgtgagcaacagggctgtttacttcacctgggtgcaggcgggctgagtcggaaaagagagtcagggaacggagataggggtggggccgttttacaagatttgggtatgtaaaggaaaattacagtcaaagggggaggttgttctctggctggcaggggtgggggtcacaaggtgctcagtaggggagcttttgagccaggatgagccaagagaaggaatttcccaagataatgtcatcagttaaggcagaaacaggccattttcacttcttttgtggtggaatgtcatcagttaaggcaggaacccgccatctggatgtgtacgtgcaggtcacaggggatatgatggcttagcttgggctcagaggcctgacactaaccattgtctgagcattagggccattcatttccccctaaaaatcactgaatatcacgcaaattgccatatttcccccatgtccccttcccctatgaaaaaggctaagaagtatctgtaccccattgggttattgggtaatcagtctcctgtgagtcccctgggcaatgcatgttaaaaatacatttatatgctgccttcttctactagtctgccttttgtcacttcattttcagtgaaccttcagagggtgactgaggatgtgttccctctttgcccctacacagccaaagtggttaacatctcccccgaaatcctttacaggcatacaaaaatcatattacaaaccctccattccatccccagttcataccccagccacctcctctatctgaccctcacacatcaatctgcctgaatcactcagggccaggtactggaccactgaagaccagccgcgcattcttgagtctctgacatcattcaaagcggccaatcctgagctgtttccccttccctgccttgcctttcccatggaaaccgcaataaaggccctggcctaggctttccctctctctcccacctgctgaccgaacctggtgctttcccctgcatggcatggcatgcgcccgtctctcaggaagtgtaggtaatcaattctttcaaaggcatcaacttcatgttgtcactcagtcacttccagaagattaaatctcataaaggccgggtgcagtggcttatgtctgtaatcccagcactttgggaggccgaggtgggtggatcactcctgaggtcaggagttcgagaccagcctggccaacatggcaaagccccgtcgctactaaaaatacaaaaattatccaggcgtggtggcacgcacctgtaatcccagccgctcgggatgctcaggcaggaaaatcgcttgaacccaggagacagaggttgcagtgagctgagatcatgccactgcactcagcctggagctagactccgtgtcaaaataaataaataaatacatctcatgagaagaactgagacaactcccacctttctctcagcatctgctccctgtaggagccaagctgatccaagagattgatccaataagtaatcatattgaggataacggaaacccgggttaaaaccataaaggccaggccaggtgcagtagctcacacctgtagcactttggtaggctgaggcaagagtatcacttgagcccaggagttcgagaccagcctgggcaacatagtgagaccctgtctctacaaaaagacaaagtaaaaattagccaggtgtggtggcatatgcctgtggtcccagctactcaggaggctgaggcaggaggattgtttgagcccaggagatcaaggctgcagtgagccgaaattgcatcactgccctccatcctgggagacagagtgagaccttgtctaaaagaactttaaattatgtgatgtgaaatgtttaaaacagtttctggcacataatctttcaatgaattggagatattagtatgtaaaatctagctactggtgctgggtgtggtggctcacacctgtaatctcagcactttgggaggccaaggtgggcggatcacttgaggtcaggagttcgagaccagcctgaccaacatggagaaaccccgtctccattaaaaatacaaaattagccgggcatggtggcgcatgtctgtaatcccagctattcgggaggttgaggcaggagaatcacttgaacccaggaggcggaggttgcggtgagccgagatggcatcattgcactccagcctgggcaacaaagaacgaacctctgtctcaaaaaaaaaaaaaaatttgctgggtgtggtggcacccgcctgtagtcccagctactttggagactgaggcaggagaatcacttgaaactgggaggcagaggctgccgtgagccaagatcgcgccactgcactccagcctgggcaacagagcgagactccgtctcaaaaaaaaaaaaggagaaagaaaaagaaatcaggctactaaaatatgtagccaatgtgaccctcatatgtaagtatagtatcagagtcatcctaatttctgccacgagagggcgtgtcaggcttagttagggcttagctgccagcagctcccaaatgatggtctcagaactccttaattttattattatgattactattattagtattattttgaggcaggtccacactctgttgctcaaactggagtgcagtggtgcaattgtggctcactgcagcctcaaactcctggactcaaacgatcctcccacctcagcctcccgagcagctggactatgctgtgtaggccaccacaccggctaattttttcatccttgatagagatgggggtctcactatgttgcccaggctggtcctgaacccttggcctcaagcagtctttccactttagtgtcccaaagtgctgggattacaggtgtgagccaccgcccccagtcatgtttggattttttaagtgacatatcggccgggcacagtggctcacacctgtaatcccaccactttgggacgctgaagtgggaagattgcttgagctcaggagttggagaccaggctgggtaacagagcaagaccctgtgtctacaaacaattttaaaaattagctggacgtcgtggcgtgcacctgtagtcccagctacggaggaggctgaggtaagaggatcacttgacccaggaggttgaggctgcaatgagccatgatcacactgcgccactgcactccagcctgggcgagagagtgagactccattaaaaaaaaaaaaaaaaaaagtaccacatgtctatggcacatataatgtaacgccccaactgggttcaggatagttcctggaatcaaacacatcaacatttatgcaatgaaatgagggctattcacagaaacgtggagtaaatatagaagattgccaaaatagccttgtgttagttcaggtcaagttttgccaccaaataagttatacaacaatctctaccttttcagagttatttggaagttggaattgtgtgtggatgggggggtgtttgttttgttttgttaagacggagtctcgctctgtcgcccagcctggagtgcagtggcgtgatcttggctcactgcaacctccacctcccaggctcaagcgattctcttgcctcagcctcctgagtagctgagactacaggcacgcaccaccgtacccggctaaatgtcatattattagtagagacagggtttcaccacgttggccaggctggtctcaaactcccaacttcagttgattcacccaccttagcctcccatagtgctgggattacaagcgtgagccatcacacctggccggaattgtggctgatgaagggtgagcctctcatttctcatagataagaggtgtcctgccaggtcaaagcttgaatgcaattctgctcacagacatacagagtcagatatcccttcttttgatgaattaaaagtttgtatttaaggtgaataagacaatattcagtcaaaagtctgtttttctttagagtcaacattttgaaataagaactaaataagagcgttcctatgtctatgtagactacggcagaagccaaggctgagtgatcagcatagatcatctgagattcaaataccatgagaggggtagacgtgggccatacaattctctgaagtggagaactttcccaatatcagcttctgcccgaaagagggtgctacgttcctttgatccatgtgtaacagttgctttcccagaaaagtcagagtgagttaaaatgctacaggccaggcgcagtggctcacgcctgtaatcccggcattttgggaggccgaggcaggcggatcacttggggtcaggagttcgagaccagcctggccaacatggtgaaaccccatctctacttaaaaaaaaaaaaaaattagccgggcatggtggcgggcgcctgtaatcccggctactgaggaggctgaggcacaacaatcactggaacccaggaggcagaggttgcagtgagcccatatcgcgccactgcactccagcctgggcaacagagcaagactccatctctaatctaaataaaatcaaataaagtaaaataaaataaaataaaatgctgcagccaggcacagtagctcacacctggtaatcccagcatttggaaggctgaggcaggagggttgcttaaacctagtagctttgtttattttctttccttaagacagcagaaaaggtgatttatttatttctatttatttatttgagaactacaggtgcagactacaggagcgcagcaccacgccaggctaattttttgtatttttagtagagatggggtttcactatgttggtcagtctggtctcaaactcctgaccttgtgatctgcccccctcggcctcccaaagtgctgagatgacaggtgtgggtcaccacgcccggcctattttatttatttatttattttgagacagagtctcactctgtcaccaggctggagtaaagtggcatgatctcagctcactgcaatctccacctcccaggttcaagcaattctctggcctcagcctctcgagtagctgggactacaggcatgcaccaccatgcctggctaatttttttttcttcttcttcttcttatgcttgtttcctatcagctgatttttgtattttttgtagagacagggttttgccgtgttgcgcagtctggtctccaactcctgggctcaagcgatccacctgtttcgccctctcaaagtgctgggatgacaggtatgagccatcaggcccagtcagagcctagaattttaagtccagccttggcaacatagtgagaacccatctttacaaaaaaacaatttaaaaattagcctggtgtgatggcatgcgtctgtggccccagctactctggaggctgaggcaggaggattgcttgagccccggaatttgaggctgcagtgagccatgatcacaccactgcactccagcctgagcaacagagtggaaaaaaaaaaggtgcaatgttcttgttgtttctatctaagatggcctgccatgattgttaacagattcttcctgtacaagaggacttgaacaggatacaggaaacccctccttgccagagctatgcgtgcatcgcacaatgcctggagtccctggcttcagccactaattaccggaagctccataagtttgcaaatacctcccagcttccaagagctactcactgagccctaaaaaaggtgcctgcaggagaggtgagggtgcagggcctgggaggggccccttggccacccagagtctgtagagagtttctcctcctgggagacgctgaggccaccagcaggggactagggccacagtctccgtcacaccgctgtccagggcagtcacctgcatcagcatcaagtagacatcagcatctgcacagggaaccgtgacatatacgagacctttgcgtacatgcatgtgatgaccataaacatgagttcagcattcaaggtttgtttgtttgtctgttttttgagacggagtcttgctctttgctcttgtcacccaggctggagtgcagtggcatgatctcagctcactgcagcctccgcctcccgggttcaagtgattctcctgcctcagcctcctaagtagcagggattacaggtgtacaccaccacccctggctaatttttgtatttttagtagagacagggtttcgccatgttggccaggctggtctcaaactcctgaccttgtgatccacctgctgcggcctcccaaagtgctgggattacaggcatgagcccacacccagcccagcactcacattttattaaaggcagctgctcttctttaaagaaccccagtgtgtacaggtgtcagtatcagtcactatcggcaccaacatgcgtccacgtgccgtcatcggtaaccatgctactatcaaggcacgcctaaggctaagacacagatcttaacacgatggcatgtactgacacatgtagttgtcagaattcacatgggtggatactgacttgtgtgttgatggcagctagtgacatgacacctgcctgtgtgccattgacacatgcatgggcatatatagatgtgggcacacgcatctacactcggtgtgaaagtgtccatctgagccccatacatccaccctccaggctggagcccctcgatgggctgaggccattctgattaagttgtgtcccggtatctggcagagaacagacgcatcataaacgcttgaatgagggccaggcttggtggctcatgcctgtaatcacagcattttggaaggctgaggtgggtggatcacatgaggtcaggagttggagaccagcctcgccaacatggtgaaaccccgtgtctactaaaaatacaaaaattagccaggcgtggtgacgggcacctgtaatcccagctactcaggaggctgaggcaggagaatcccttgaagctgggaggcagaggttgcaatgagctgagatagggccattgcactccaacctgggcaacaagagcaaaacttcatctctaaaaaaataaataaatgctagaatgaggctgtgtgcagtgtctcacacctgtaatcccagcactttgggaggccaaggtgggaagattacttaagtctgggagtttgagactagcctgggcaacatactgagatatcttctctatctaataaaaaaattaaatgcttgaatgaatgaataaatggcaacaaatactttgaacagacgagggccaggcactgtgataagcactcacatgcctgatctaattaatccataccacagtctctatgggtaagaactaatgatcccactatacagatgggaaaaactgagtcataaagacaggatgtagctttcccaaagccatatgccacgtaagtgacagagcctggatttgacccaggtctctcaaactcaaaaactaatgttcttaatcactgccccatcctcgttatgatgggacaaccctctctcccaattcctggattcctgggacacaccaccaaactccttccagtgcaggcgctcagcaagctacaagaaagtaagacagcctttcatcatcaaaacagaggaggccgggcgcggtggctcacgcctgtggtcccagcactttgggaggccgaggcgggcagatcacgaggtcaggagattgagaccatcctggctaacacggtgaaaccccgtctctgctaaaaatacaaaaaattagccgggcatggtggtgggtgcctgtagtcccagctacttgggaggctgaggcaggagaatggtgtgaacccgggaggcggagcttgcagtgagccaagatcgcgccactgcactccagcctgggcgatacagtgagactccgtctgaaaaaaaaaaaaaaaaaaaaaaacagaggagaaaagagagaaactttaaacccaacgaagctcagaagttctgtgtcagggctgggtgaggtggcacatgccagttatcccaatgctttggaaaaccaaggtgggaggccaggatttgaagaccatcctggacaacacagcgagaccccatctctacaaaataaaaattaaaaaattagccaggccctgtggcatgcacctgtagtcctacctacgtgggaggctgaggtgggaaaatcacctgagcctgggcagtgaaggctgcagtgagccatgatcacaccactgcactccagcctgggcaacagagtgagatgctgtctcgaaatgataatattaaagagctacctgaaaaaataaaaaattcagttcctcagtcacactcaccacattacaggtgctcagtagccacatgaacaatttagatacagatcatttccatcatcatagaaagttctgttggacagcatggtctagcatgggtgtccaaccctttaaatggactgactcttctgcttatcttttttttatttgtctgttttttgagacagggtctcactctgtggcccaggctggagtgcaatggcatgatcttggctcactgcaacctccgcctcccaggttcaagcgactctcctggctcagcctcctgagtagctgccaccacaggcgtgcgccaccacacccagctaatttttgcatttttggtagagacggggtttctccatcttggccaggctggtctcaaactcttggtctcaagtgatacaaccacctccttttttgcttatctgtggtagtagatatcacgaaaattatacacagaccttttgagacagagtcttgctctgtcgccaggctgaagtgcagtgccgtgatctcagctcaatgcaacctccatctcctgggttcaagcaattcccctgcctcaaccctcaacctcccgagtagctgggactacaggtgcacgccaccatgcctggctaattttttgtattttagtagagacagggtttcaccatgttggccaagatggtctccatctcctgacctcaggtgatctgcccgcctcagcctcccaaaatgctgggattacaggcatgagccaccacgcccagccatggaccttttttttttaagcgatcacctatcattagggtattttatgtgagatccaagacaattcttctgcttccaatgtggcccagggaagacaaaagtttgggcacccgtgatagtctaccccagtctatatatgatcgattcttctttatggcattgtttaacatattcctctgttccctgcctttcctgtacaccagtagttacacgtggaagccgaataatttcaggttcaattattttggtgaaaatacttcctaggtctgcatccttccaccagcagacacatcaggtctcgtctttattgtgtgagactcacatcctattggccacaggaagtcacatgaccaagcctgacatcagtgagtcagggaatgtatttgacatactcaagaggacctgtaaagtcacatggtacagtcatggatgtataattctataacaaggaggaagtggagatttggaaacaataattcaagctaccatgagggcgtttttgttttgttttgttttgttttttaatcaaatgaacttttcagaaatgactcggtcagatgcggtggctcacgcctgtgatcccagcactttggtgaggccgaggcaggcggatcgcctgaggttgggagttcgagaccagcctgaccaacatggagaaaccccatctctactaaaaatacaaaattagcggggcatggtggggcatgcctgtaatcccagctactcgggaggttgaggcaggagaatcgcttgaacccaggaggcagaggttgcagtaagccgagatcacagcactgcactccagcctgggtaacaagagcgaaactctgtctccaaaaaaagaaaaagaaatgacttacgcctgtaatcctagcactctgggagctgagatgggaggatcgcttgagaccaggaggtccagaccagcctgggcaacatggcaagaccctgtctctacaaataattttaaaaattagctgggtgtggtggtctgcgcctgtggtcccagctactcaggaagctgaggcaggaggatcacttgagccctggtcaaggctgcagtgagctgtgttcatgctacagtactccagcctgggcgacagagcaagatcctctctcaaaagaaggaaataagccagatgcagtggctcacacctgtaatcccagcactttgggaggccaaggcaggcagatcacctgaggtcaggagttcgagaccagcctggctaacatggtgaaaccccgtctctactaaaaatacaaaaattagccggacatagtggcgcacacctgtaatcccggctactcgggaggctgaggcacgagaattacttgaatatgggaggcagaggttgtagtgagctgagattgccattgcactccagactgggcaacagagtgagactccatctcaaaaaaaaaaaaaaaaaagaaatgaaggaaggaggaaggaaggaagggaaggggaagggaaggaagagagacagagagagaaggagaggaagggagggagggagggagggagggacggacagacggacggacggaactaactctatgagtcacagagaggttaagtaatttgttcaaggttctgcagctggtaaatgatgggattagaatgcaggcagcctggctccagagtccactataggaaaacattggagcccacttaatggggctgctgtgacattccaatgtgaacaggaatgccaagggctcaggacagcgcttggcacaggatctgtgcatcatgcttggaactggtgctgtttatttccatcacctgattctgggttggccttggcttgggtttggagggattttctgcccctggcagtgttccaggggtggcagctggactttttaaatccaaggaccttgttaggagtcagagttgggcaaggggagactggagataaaatccgatcacaagaggtagctatgaataggtcaggagcaattctccccagccttgagcagtagggaggatgagtcaacagaagtgaactcacccttcctacttgttatagaattatacatccatgactgtaccatgtgactttacatgtcttcttgagtatgtcaaatacattccctgacccactgaggtcagggttggtcatgtgacttcctgtggccaataggatgtgagtcatacccaataaagataaccagacctgatggtaagtagaatatccatgaagatgtgcaggagaccatggccagcaacactggcttatcagaactgggttcatgcacaggtctgagtttttgttgctgaaccctctttccctgtcaataagacaagcatttattccccagtatcccaaggcctatgactccacctccaggctgccactcataggtggagctcacctggcacctgcggctggaacatctacttatcacctttccatgtggctccttgggcttcctcacatcatggcagctaggtcccaggggctatgggacctagctagatattgtgcttcatagctagatacggtgctatgaagagtgtggcagttgacatttcctggaaatggtcacagtaatattttgagtctcacatgctctcccttgtggtagcttgcccctcccatcaaaaggcagagtattttccttttcttgaagctgggcagaactttgtgattgccttgacagaggggaaaaaaagggttgggggggtgcagaagtgacactatatgcctgtgtgacttccaaggctaagtcataaaagcagacacggctttttcttgtcctttcccttcccttcccttctctctctcagcctccctctccctaccccttccccaccactggcctctgggacctagctgccatgatatgaggaagcccaagcagccacagggaaaggtcacaagtagaagttccagccacagggcccaggtgaggtcccagctgataggcagcatcaactgccagacaggtgagtgagaaagcttcagatcattccagtccacagccttttaagccaccccaaggggtgtcaagtgcagcaaagatgagccatacctgctgagccctgcccagattgcagatctgtaagcaaagcaaatcttttcactggggtggtttgtaaactagggaagttccagctctttcctagttgaagacttttcccttctttaaaacctaactcaggccgggcacagtggctcatgcctgtaatcccagcactttgcaaggccaaggcagttggatcacttgaggtcaggagtttgagaccagcctggccaacatggcaaaaccccatctctataaaaaatacaaaaaaattagctgggtgtgatggtgcacacctgtagtcccagctactcgagaggctgagacaggagaattgcttgaaccggggaggtggaagttgcagtgagccaagattgaaccacagcactccagcctgggcaacagagtgagactctgtcagaaaacaaacaaacaaacaaaaaacacctaactcagatgttgctttcctgcttaaaagcctcccatgttcccatctccttcagagtaaaagccgaagtctatacttaatctaaaagatccttcctacatgatctgccaataccacggtttcctgtcaacattgactctctgacctcttatcccactctccccatccacccctctgctccagccacactggcctccttgctgattcttaaacttacgaagcaagtcccacctcagggcctttgcacttgctgttctcccagctcagaaggctcttcccccagaactctatatagctcccacctcatgatcaggtctttgctcaaatgtcatcttctcaataagcccttccatgaccacactatttaaaattacaactccccctccctccccacaaaataaatcactcccatccttattccctgggttccatttctgcagagcacttagcataatctaatggattgcatatttcacttatgtttcttgtgtataatctgtctgcccaactagagtgtaagttccatgagggcaggtgagggatctctatctgtcttggtcactgctgtatccccagtgcctacaacagtgccaggcatatgttcaccactctgtgaatatttgttggtataaatggaaggaatgaatggattaatgggtgcatatattgttggaagaatagatccaagggaaaggaaagaggagggtaacaggaaaagagcccaactcaccctaaaaacatgaaggcttccatttgccaaaggcagaagatacttaaaaaaaaaaatcttatctccacaaccagatgatcaaccaactaatcaatcactctccaaaccatgtccctcttgcctcctaaacatttcttgtttcttccaacattttattatgagcaattgcaggcatgcagaaaagttgaaggattttacaatgaacacctttaccccaatcacctagactccactctaaacattttactgtctttgcttaattatatttctatacatttatccatccctccatccatccctccatccctccattcttccatccacccattactccatccatccatccattactccatccattcatctctccttccatccattacaccacccatccatccatccatccatcacaccatccatccacccaaccatccatccatccatttatccatccctccatccatccctccatccattcatctctccatccatccattactccatccattcatccatccatccatccatccatccatccatccatccatccatccctccagcttaattttgatgcagttcagtgaaagttgcagacaccagtacactgccccctaagtccttcagagtgtctatcggtatttgtttaccattctttattttctattttgaagtaaagtttacatacaagatgtgcaaatctgaagtgtgccattcactgagttttgacaaattcatatacccgtataacgcaaacttctgtcaagataaagaagcactcccctgatgttttttccactatacatgagccttacttgttctggaatttcatttaagtgaaattgcataatacattctttactgtgtctagcttctttcgttcatcataaggtttttgagagtcatccatgatatatgtgtatcaatacttcattttttttttgttgctgatagtattcactgcatgggcataccacaatttgcttatccattctactaatgatgaacctcaatatctcttcaatccaccccctttccttcatctccatggccccttccctggcccaggcatctcttctttacacccaggtctccactccagcccagcctccttcttgctctctgatctctaatctcactccctgtcatccaccttccagaggattttgttttgttttgtttcgttttgttttgttttttaatacagggtctctgtcacccaggctggagtaaatggcaggatcatagctcactgcagcctcaacttcctggattcaatcaatcctcttccctgagcctcctgagtagctgagactacaggtgcatgccaccatgcccagctaatttttaaattttttaaagagatgggctctcactatgttgctcaggcttgtctcaaactcctggcctcaagcaatcctcctgccttggcctcccaaacctgggattacaagtgtgaactaccacacccagctcccagaggaatccttatcaggcacatgttgtgttctgtcctgctcaaaactcggccatggctccccagtgctccctggggaatgcccgagattctttaatggctttcagacttggtttgatctcaccccgatgcacccctccaccatcacttcccatctcctctctttataatccaggctgcaaccactgtctacctgtcagttccctcaatgtgccaagctctcttttgcctccaaactgttgtattatcttccctttgcctacaatacttttcccccagccctctcattcatgtatttatttattttacagatgaggtctcactctgttgcccagactggagtgcagtggcacaatcatagctcattgcagcctccagctcctgggctcaagcaatcctcccgtctcagcctcccaagtaactgggactataggtgcacatcaccatgcctggcaaagttaaaaaaaaaaattaagagatagaggccgggccgggcgcggtggctcacgcctgtaatcccagcactttgggaggccgaggcaggtggatcatgaggtcaggagatcgagaccatcctggctaacaaggtgaaaccccgtctctactaaaaatacaaaaaattagccgggcgcggtagcgggcgcctgtagtcccagctactcgggaggctgaggcaggagaatggcgtgaacccgggaagcggagcttgcagtgagccgagatttcgccactgcagtccgcagtccagcctgggcgacagagcgagactccgtctcaaaaaaaaaaaaaaaaaaaaaaaaaaagagatagaggccgggtgcagtggctcatgcctctaatcccagctctttgggaggttgagatgggcggatcacctgaggtctggattttgagaccattttggccaacatggtgaaaccccatctctactaaaaatacaaaaattagccaggcgtgatgtcagatgcctgtaatcccagctactaaggaggccaaggcaggagaattgcttgaacctgggaggcagaggttgcagtgagccaaatcgcaccaatgaactccagcctaggcgacaagagcaacactcagtctcaaaaaataaataaatacatacataaataaaataaaaattaagagatgggatcttgctatgttgcccaggctggtctcaaactcctggcctcaaacgatcctcccccttcagcctcctgagtcattgagattacagttgagagccactgcactcggctgtccccaaccctctctctgcttgcctcactgttattccttcttaagtctgcatccaaatgccccttccacaataaacctttctgacagccccgacagggtgggtaaggtgcttccaccaagctcccacagttcctggcagttcagaccactctacaatttaatattaaaaggtcttaaattcccacttaacttcagttccaggtacaaaacttgtctcttcaaacaagaacatatcctttagcaaaagttggaaatcattttaacggacacatttcccttattgccttagctgctgggaacctctgagcgaagtttaacgctaacctacatcgtagagagacacctgttgcatctctgtgtgtaaagtgttagttctattttaatgtttgttgaaatagtgccagcttttcttgggcactgtaaatccctccgattggctctctgctgtgactccctcataccaaaatcaatgagttcttccactgaatctatcatccaactactgccccctccaaactcttccaacacacccactggaactctcgttgtcttgttaacaaccactccccttcctcagtttctcccttgaacatctcttctaccccatgtccttacctaaaccctaagaagctctaagaacaatgcttcctctgcagccccttctactatttatttatttatttatttatttagagacagagtcttactctgtcactcaggctggagtgcaatggcatgatcttggctcactgcaacctctgcctcctgggttcaagcgattctcctgcctcagcctcccgagtagctgggattacaagggtgtgccaccacacccggctaatttttgtatttttagtagagatggggtttcaccatgttggccaggctggtcttgaactcctgacctcaggtgatctgcccgcctcagcctcccaaagtgctgggattacagtcgtgagccaccatggccggcccccctttataattcagactgctccttttctaacatcccacctgcctctacactgagggttgaaagctgatttctctatcaagattcttttgggtgcaagtatctaaaatccattcaaacgaatctaagcacaaagcaaataaggcaatagtgaatgaagcaatatttgacaaaagcaacagcaaaaaaaaaaaaaaaaaaaaaaaaaagcccattgtgggtttcatttgaaaaatccaagaattaaactggagttcaggtatggctggatccaggcactcaagtgctggtgtcaaaactgcctttcacaatcgttcatttctgcacaatctcttttgcactgaacctcatctcataaagcctctcctctctttgtggcagtgtgagccccatctgctccatctgcccagcaattccagcagacatagaaaatcctctttcctaatggtttcagcaaatgtctcagggttgattctcattgggctaaattaggtaacatgccttccctgaaccaatcactgtggccagggaagcagactcaactgattagccaggtttggatcctatgtccatccctggagctggtgaaggcagagcagtggccaagccctattcaaattaaatagatgaagaggacagagaagtggtttcccaaaagaaaacagagtggggaactggcgtgagccggggagccgtgtggattcctggaggaagagtgtgctaagctgtgggaacagcaagtgcaaaggccctaaggtgagcaacttgcctggcaagttcaaggttcaacaaggccacttctgctgtagtatcctcttccctgccaaccaaatccagaatagtggtccaacacacacacacacacacacacacacacacactctgttccttatccaactgtaatgctttcacccttgcttggtacctttgtacttctcccttcatagtcgactagttaaaaaaaaatacatttctcggctcttttttgaagtaggtgtgattgagttaaaacatatttacttgacataagcttaattattcatcaatgggaacctgaaaagggagtcagagaggccaagaggttagggtggagtagagggggtagggaaggtaagctggggtgcagagggtgcagactggaggaatgggggcgaagtggggtatgggactggggtggcagggaggggctggggagagagagagaagggtaggtgccagagggccaaggattgtggaactggggtggggttgggagttggggggtggggaggagatgtggggtactctgtgaataccttagaagggatagagaaggcagggctaggggtttggaaggggtgggattggaggtcagaggggctcaactggggttaggaaatggaaaggtgagaagaggtgggggttagaggctggggactggggtccagagagcagagtgaactgagtgggttcagaagagtactggcgttggcacttcagaggctggactagagaaggcgcgttcagccgacggtgcgggatacactgccgaggaagtccgcggcgaggggcgtggttggggggtgtgtattacacggtatcccccccttgcctttccaagtctttccctctggttccgcctccttttcaggagtgacataccgttgcccaatcagagcctcaggcctggcgtggcacagccaaccgcgcggcgtggggaggagctggggagggggctcgcaaggccggggagggggctaggggcctccgagggctccggagcggcgactggcgagccatggcgctggggctgcagcgcgcaaggtactgaagttcgggggcaggagttctgggaattggggggctctcctcctggagacccctgagctggattgttggggggggtggggttcgcgggtgcgagccaagaacgccccggggcgcgcagttggaggcacatccccaccgcactctccacccttagggactgcaggggtgggggattccctacgtctctggctgccccgcccctctggccaagagcggcttcggggttcccgatttctcgctacccaaggctcatttaccctcctggttgggggtggaacttgggattcctgataaattaggggtgattgcatttgagcagtccccaggcttctgcgggagatattcgccctccacatattgatccctctggcctctgaaccccccaaaattgagggtattctttgccaccaggtgcctgggatcctaggtgatatgggatacccctaaatggagccttcccacatatagggagtcccttggaatggcattcagctcctgagttcaagagaggagagatctcctctaatagtatgcttcctgacacagtctcctaaacattgggtttccctagaaatgggcagaggggagcccctttcagaagccgtctgggacccttcccaagagactttttgtatcctttcaaaagccagagtcacccccttaaataacagggaaacaagctggacccacttcccaaagtccagcccctcatctcacccctgcacccccatcctgagagacaggggagcctcatccaagctttattttggggagactccatggcagggtgctgtgagcctgcaggctgtgatgggaacgccccctgccgcagtactcagatggggtcatcccgggcagagggtgggtttctgggttcacttgcccagcaggtgcagctctgctggaacacaggggaacctgtgccctggggccgctgccggggggttttatctggccatgttcccatgggaccctggaaaatgttctaggtcctcagctttccctgtccaatgtgaggcacccagtaagcctcacccccttccctcctccctggcttctcaggcctgattggatccatgcacaccccatgtttctaaccgcccccatcctctcccctgtcccctactctattccaggccctggctctgggcctaacaaggaactctatcccaccccttttgggccagctgtcgttccgcccctctcagcgccccctcctggctgggtgggggcccctcttggctgagctcgggtgccccccctccccacccaaggccggccctttcctgtggagtcatctcaccgccgtgcgcacccactcgtaactcgcacccgggtcctggctgcaccgcatcccctcctgcaccccctggatggcccttcagccaacgggggcctgggcgatggtgagtgggcccccaacacctcctttcccccttcccttcctctagctggggctggctgccatcccactgtggccaaggatgctcttgggaagtccctggtgggtacggcttgcagcccagagtgcccagtgaggtagtattcccggagaagataggattttggggaccagcaccctaccagattaccatgtccttgagaacaggcagagtcggggggcagagagactcccccagacccccatgccaagtccctttgcaaacccaaaccctgcctctggtctctcaggacacctctctgcaatgccaaaaggcatccttgcccagctacaacctaaacccccacccaccaaatcctctgtgcttttcgtaagacgcccccccccaatacccagctgggtgtcagaatagaaaagcccagaagtagccctgaatgtgggcagggactgcctgcttttattatgccttcctcatgggtggcaaattcttcagggcagggaagaggtgaacttctctccttcctggttggaggggggcactgggccccaacccccattctcaggcctcaccctgagcccgccaggccctggccccaccccctgttcttggctggaacacggaggaagggtggcagggttccagctgcacgtcccaagctgggcagagtgccagggggctggaccagggctgggcatggggccagctggggcgatctggaggcagcaggggtgtgacgggggaagggaccgaggctgctaggcaaaagaggggtggggcaggggcctcttgggtgggggccacacctgccaagagcacagggcccaaagacagggttcaaatcccatctcacccacttcctggtggtgtggaattgtgtcagtgactgccgctctgagcctcactttcagatcctggaaatacgggcaggccgggtgcggtggctcaggcctgttattccagcactttgggaggctgaggtgggcggattgcttgagttcaagaccagcctgggcaacatggcaaaatctcatctatactagaagtaagcaaattagccaggcatggtggtgagtgtctgtagtcccagctactcaggaggctgaggtgggaggatggcttgagcctgaggcagaggttgtaatgagccaagatcaggccactgcactccagcctggacaacacagccggaccttgtcgcaaaaaaaaaaaaaatagaaaaatagaaaaaaaaaagaaaactgggtatcacactccctttccaccaccccagatcaagatgaggagccagtagtgaggaagcagacggtggggggcgggacacccaacaggtgtgccacaaactgagctcaagtcagagtagacagacctggcttgaatcctgtctctgctactaaaagctgtgtggcttcagtttcatcacctctttgggcctgcttcctcatccggaaaatggggaaagtcattgcaggaacatggtcggattcactgagaagtggttgaacatagttcagtgtcaatggagggcgctgggttacttgggctggggatgccattgctccaaatctcagtttctgcctctttaaaaggagagatcacttctcctgctcaatagggtagtagtaaggacttaatgggttctctagctccgtgagtgttcaacacaccaatgctatcattattacagtatcactgttatttaatcctccttttaagatgcttgtgtaaaaaccatgtatgtaattgcatgcacacaccacactatggggcgtgtagagtaatccacaggttactgtaaagcccaagaagctcctaagcccatgctttccatctctgatacgcacagagggagaacagtaagtctaaccttggccgggcgcggtggctcatgcctgtaatcccaacattttgggagtccgaggcagacagatcacctgaggtcaggagttcgagaccagcctggccaacatagtgaaaccctgtctctactaaaaatacaaaaattacccaggcatggtggcaggagcctgtaatcccagctactcaggaagctgaggcaggagaatcgcttgaaactgggaggcagaggtgacagtgagccaagatcaagccactgcactccagcctgggcaacagagcaagattacgttcacacagcttataagcagtcacacagcttgtaagtagtggagcttgtaagtagtagcttataagtagtggagttgataagtagtagagtcaggattggaaccctgagccagaggaactagcccccagtctgtgtaatgggaaagacccacacttcccagtagaacatccagagggcaggctgggagctggaaggagggtccctccgcagccaccagctggctccttctatggaagaagcagcccagccacagaggattacagagcccagctgcctgggaggtggggcactggccccacctccctgccagttcccactccctgttccctgtcgggcccccagctccgtgaggccctctcgcccccaccctctgggcaggaagacaaacagggctggaacagaacaggacggaatgtcctctcaggcaggcaggactgaggcccctgcccccaccagccaggaaggaggggacggggacaggggccgtatctcccctgctccaaccctccatccaaactgcccccttctgtgcctccctccctgctgtactgaggattttattttccttctgtctccagacaggaaaatatccccttgccctggggggtggggccgcaggtctcttgcctgaggctggggttgatgccaccccagaagcaccctctgctcttgaatttaagaagggacagtgtcccctcctagaggttctgcttccctcggatgggtcccaaggaggggatgagaaaaagcctgaagactggaaactcaccgcccagattcaaatcccagctcagccagttgttggctttggggcttcttgggcaaggacttcacctttcagaagctgtttccccactgtaaagtggaagtttaaaatgcccccctccgccgggcatggtggctcacgcctgtaatcccagcactttgggaggctgaggtgggcagatcacttgaggtcaagagttcgagagcagcctggccaacatagcgaaaccccgtctctactaaaaatacaaaaattagccgggcgtggtggcagatgtctgtaatcccagctactcgggaggctgaggcaggagaattgaacccggcaggcggaggctgcagtgagccaagatcgtgccattatactccagcctggctgacacagtgaaactccgtctcaaaaaaaaaaaaaaattaaaaattaaaaattaaaaaataaataaaaaatgaaatggctccctcctaggggtcccctgaggattggatgaatacatgtagaatatatagtacagtggcaagcacataaatgcttagcaaatgacagctgcctattactaatagtaatatttatcaatataaatgtagatgagactatatataccatatactacactagattatatatacaatatagtagatgtaacacatcatataataattttttattttgcctatttttgttaatttgttttttgtcttttttttgttttttatttgtttgttttgagacggagtctcactctgtcgcccaggctggagtatagtggcgcgatcttggctcactgcaacctccacctcccaggttcaagcgattctcctgcctcagcctttcaagtagctaggactacaaggtgcccaccaccacgcccagctaattttttgtatttttagtagagacagggtttcaccatgttagccaggatggcctcgatctcctgacctcgtgatccgcccgcctcggcctcccaaagtgctgggattacaggcgtgagccactgcgcccggcctgttttttgtctttttttagagacggagccttgctgtgtcacccaggctggagtgcaggggcacaatcatggctcactgtaacctcaaacctgggttcaagtgatcctctgtctcaccctcccaaattatagccgcttccggctataattttgtatgaaagaggccaggcgtggtggcttacacctgtaatcccagaatttggggaggccaaggtgggaggatcacttgagttcaggagttcaagaccagcctgggcaacaaaatgacacactgtctctacaaaaaatacaaaaattagctgggcgtgctgatacgcacctgtggtcccagctacataagaggctgaggctggaggatggctttagcctaggatactgagtctgcagtgagccatattcatgccattgcactccagcctgggcaacagagcgacagcctgtctcaaaagaaaagaaagaaaagaaaagagaaactttgggttcagaaagacctggagtttgaatttgaagacagtggcagaaacagggagaagagctaaaattctggacataaatccaggcccatagagatagagaaaatttgagaatttaggtagaccattgtttaaaggcaggcttccctatttgtgggcaggcactgcacctctctgagcctcggtgtcctcatctgttcaatgggacgttatcaacttccttctgggtggcctgagcattaggcgggttaatataagtttcgcacttggcactgggagtgacaaaatagtaaaagctggataagtggcagatatttctgataaaacgacacttattcttccaaccccacatgcaaaatgtaggtatctgaagtggattacagggcagggtgagtggtaaacagaacaggttgctttgctgtgtcaccctggcgggtccctgcccctcttagggcccctgttggtggttcatcgttagactttgagatctatgttccaagattcacaggacggctcagttgagggaaaagggcagaggaggtgattctgggaaactgcagggcagggggcctgggaggctgtaggcctctccttcgtgggccctccctcctctggcccctggccagctcagccagccccctcccagcaggggccctccctgtcccccaggcgtccctagcctgggaaataaactgcagataagtcagggaggggacagagcggccctaggcgcgccacagagaggagcgaggcgccagaggcaccatggactggcaagaccacaggtaaaatcagggctaggaagggctccacagtgtagcccttccaggcccagggagcgccgcgaactcgacagggccacacatcgaggcctgcgcagccgcggcccagcactccacgagccccggccccacgtggcagctccccacgtgctcgtcccgtcctccttttctctttcccgagtcaccaccagtgaatgctgcccatgccctcaggtcgaccacggagctgcgcaaggaaaagtcccgggatgcggcccgcagccggcgcagccaggagaccgaggtgctgtaccagctggctcacacgctgcccttcgcccgcggcgtcagcgcccacctggacaaggcctctatcatgcgcctcaccatcagctacctgcgcatgcaccgcctctgcgccgcaggtgagccccgcccgcgggaattcccgtcttggtcaggccccgcccacggaaaaaaactacatcccagggaggcccctcctccgggaagccttattctgacaaagccccgccccctggtgtcgtttttttcggcggagccccacccccctggaatcgacttccccggggaggccccgccccctttgagttcctggcctgctgggagtcccgcccccctcgaagtctatcacttgtgaggccccgcccctggaacgcgccctttggaagccccgcctccttaggactcagaaaatccgctaacccttcaactcttacgatttggtcctctaggagactctcccagatggataggccctggtctctcataatatatccactgggaggctgcgccgcccaacttttcgttactgtatctgagagtcccttgtcccttccccacccctctagttctacatcacttgttctcttagtaggcatctccttgaatttctacccagttagaattgcatcctgcagcgggctttgccacgcacgtgcacgcgcgcgtgcacacacacacatacactcacacataaaccccgtggaatcccaggaccctgaaagcgggggaagtagcgttattctctgggaggctctgtccatttgacttccctgccccatagaattttacttttcttggaggctttacccccttagaagtctgttccctgggagtcccttcttctctagagttctgtccctctggaaggtcctgccctccatgagtttgaaccccttcgaggcttccccctcatctctatattacaattccccttaggccctggccccttcatattttgaccctggggagttccatccacttagaattctgtcctcctaggaggcccacccacatccttagaattctgttcccttgggagactcctacttccttagaattctgccaccctgggaggccctgcttctaattccagtgcttcttggtcctgctttcttccttgggaatccaggccactaggatgtacccccacttccttgggggtgcatgtaagtttctctgaatgaggaaaggcagagggaggctagcccagggtcagtccataattcagaccataactgactagagatgcccccatccccctgccccgggcaccaggggagtggaaccaggtgggagcagggggagaaccactggatgcctgctacctgaaggccctggagggcttcgtcatggtgctcaccgccgagggagacatggcttacctgtcggagaatgtcagcaaacacctgggcctcagtcaggtgagaggagctccttgctctgtgcctggccctgtactggtgatgctggggatacagtggtgaccaggacagccatagccctacctttatgggactcacaatacaaaggggatataggtatgtcactagacaggaagacccagaatggtcagggctgggatgggacagtctagggggctgtgagagcacaggggtggggtgtacctgacccagcctgagtgggaatggagggcttcctggaggagaagatatctgagctgaaatctgaagaacttagccggtcaaagggtatggagaatggatgggatcagtgaagatcaggaatgtacatggtagagggaacagaggaggcaaaggccaagaggtgaggaaaaaaaaacagaataatttggggaaataaagttggccacgtgcagtggctcacacctgtaatcccagcactttgagaggccaagatgggaggatagcttgagttcaggagttcagtgtttcacctgggcaacacggcaaaaccctgtctccaccaaaaatacaaaaaatttgccagatgttgtggcacatgcctgtggtcccagctacttgggaggctgaggtgggaagatcatgtgagcctgggaggtggaagttgcagtgagccaagattgcaccagtacactccagcctgggtgacagagcaagacccagtcgcaaacaaacaaacaaaaaaataataaaaagtttatcctcctaggtgcagagtgcaataggagaagctgagagacaaaaggctagagaggtcatcagggtagactgtggccaaatttaaggccaaattatctttatctccagggccccggggagctatagaaggattttaagcagtggagaggttgtgccagaaaggtagaatcagatttacatttttgaaagatcctctaggtacggcatggaggtagatttggagggagtgagatcagaggttgaaagatcagcaatgggtagatgccaatctcaggtgggagaagaggaataggggcagggaccatggggatggaaagataggaacaagagacatttagaaagtagaacttacttttttaattaacatggaaggcttcatgcatttgcatatcatccttgtgcagaggccatgctaatcttctctgtattattccaatttttagcatacatgctgcctaagcaagcatagaaagtagaactaactttaattcatccttacagcaaggcctacaagaaagttcccattcttttttctatctcacataaataggctccatagttggtatctgttccttttctctgcctcgttaccccactcctggtaccaatttctctgttagtgtgagtgagctttttggacccagagagatgaatgtcccgaggttccaaagctaggaagtggcacagccaggatttgactccagctacaagagatgttgtcagaggagcgagatctccctctttccctattcaccagcaccagcaccattcacatggtgagccaatagggtccaccttcatctgtgtcccctcctcccagcaccacgctcatttcctaaattgaaatgaagaattgggttttctgcctgccagaaaagtgtgatttgaatggagtctcatctcggggccttgcgcttactattcccctctttctagaatactcttactccagggggccataaggccacctcacttgctttgttcagcagctttttaaatgtcacctcttcaaagaaactgtctagaccactctgtctaaagcagcctcccatcattgcgttaccttgtactgcttttgttttcttcatgttacttgttatattgttgttatttgttctttcattcactgtctgtctcaccccactggccagtaagctcttcaaggcagggatttgtgtgtgcagtcaccgtgtccataccatttagaagagccaggtgcagtagctcccacctgtaattccagtactttgggaggccaaggtgggaggatcacttgagctcaggagtttgagaccagcctgggcaacatggtgagacccccatttctacaaaaaaatttgtaaaaattagccaaaagctggatgcggtggctcacacctataatcccagcactttggaaggccaaagtaggcagatcacttgaggtcaggagttcgagaccaacctggccaacatggtgaaaccccgtctctactaaaaatacaaaaattagccgggtgtggtggcacatgtctgtagtcccagctactcgggaggctgaggtgggagaatcacttgaaccagggaggtggaggttgcagtgagctgagatcgcaccactacactccagcctgggcaacagagcgagactccatctcaaaaaaaaaaaagaaaagaaaaaaatagccaggtgtagtggcatgtgactgtagtcccagctactgaggaggctgaggtgggaggatcagatcgcttgagcccaggaggttgaggctgcaggaagtcatgatcgcgccactgccccgctgcattccagcctgggcaacagagcaagacctgtctcaaaaaatagatagatagacagataggtagacagacagacagacagacagacagacagacagacagacagatagatagatagatagatgagggcctggcacttggtatgcgctgaataaatgcttgctcagtgggtggatggatggatggatggacaaatggatggataaatgaatggggagactggtgaaatcatccaggctcatgaattggagcaggggaatgaggatgggatggaggagatgggtcagaagccctggtagacccccacccctctcatccctggcagctggagctcattggacacagcatctttgatttcatccacccctgtgaccaagaggagcttcaggacgccctgaccccccagcagagtgagttccctggaggcctctgtccccaccatacagaggaggaagctgaggctccacccctccctcagcatatccccacctcctgtggaacaccagactaagacaagtaggaagaggagagatggccctgccctggggtctatggggacaaagaccctgccctgggggggtctgaggggacacagccctgccctggggggtccaaggggacacatactacccctgggggaccctctctggttccaggtcccaattgttgggatggagctggggaggcctgagcagccagggtgccggagggcactgggcctgtgtgtagctgcctgtgacctccccgctgcccccgggcctccccagccctgtccaggaggaaggtggaggcccccacggagcggtgcttctccttgcgcatgaagagtacactcaccagccgcgggcgcaccctcaacctcaaggcggccacctggaaggtgcgtggggccgggccagaggagggcggggacgctggggctgggtgtgagccctgaaagatcttgaagggtgctggagtccaggcatctcctaggctggggaccctgcggggctcactcaggtcaggtctagcgggtctcagggcatcgaggagcatgggtgtctgtggagttgggacctggggctcctgtaagctctcttaggatgggttcctatgggcctggggctggggatcctcagtccctttgaacctgaagtcttcatggggttggaatctcagctccctgatgggccctcaggacgcatcttccaaccccatgggtggtctcaggcccagaggcaccactgccttgtcccctcatctcggcccccaggtgctgaactgctctggacatatgagggcctacaagccacctgcgcagacttctccagctgggagccctgactcagagcccccgctgcagtgcctggtgctcatctgcgaagccatcccccacccaggcagcctggagcccccactgggccgaggggccttcctcagccgccacagcctggacatgaagttcacctactgtgacgacaggtgggcaggggccccctcttccgtctgcccaagttcaagtgctgtttccctccccacctccacactcccgcatttctctctctccttctctctctctctctcacttcatccatctctctctctctttgtgtgcctgcctgtctctgaattttctacatgccttttatatcttttctttttttgtaaaatcgctgccttgccatttgcccagactgctctcaaactcctgggctcaagccatcctcccacttcggcctcccaaagtgttgggattacaggtgtgagccaccgcacctggcctccttttatctttcattctctttctgtctctgagtctttctcttagtgtttgtctctctttgtcccttttcttaaatgagtcaatttgtgtcaagcagttaatatggtgcccagcacacaggaagcattcaataaattgtcgataggccaggcacagtggctcacaccggcagtaccagcacttagggaggccgatgcgggagaattgcttgagaccaggagttcaagaccagcttggacaacatagggagaccccgtctctacaaaaaaattagccaagtggggccgggtgcagtggctcatacctgtaatcccagcactttgggaggccaaggtgggtggatcacctgacgtcaggagttcaagaccagcctggccaacatggtgaaaccccaactctactaaaaatacaaaaattagctgggcatggtggcgcatgcctaaaatcccagctactcgagaggctgagactggagaattgcttgagcccgggaggcggaggttgcagtgagccgagattgcaccattgcactccagcctaggcaacagaacaagactccgtctcgaaaaagaaaaaaaagaaaaaatttgtcaggcgggtggcatattcctttagtcccagctacgcaggaggctgaagtgggaggaataattgagcccaggaggttgaggctgcagttagccatgattgcaccattgcactccagcctgggcaacagaatgagacactgtctctcaaaaaataataataataaataaaataaactgttattatttgttcaccctctatccttcctttcatctctttttctctccccctctcttccttctgtccttctcttccttcttctgtcttatccctcgccctggtgtcatgcttaggaatggtgactctggattcagcctgcttgagtgtcagtcttggctgtgtatccttagccaaatgacttcacctctctgtgccacaatttcctcacctatactgtggaatcataacagaacctgccttgtacagtcgttctgagcagctcagtgagtttcccggtgcaaagcacaagtatctaatttttaaatcattattgtcatcattactttttgttgttgttgttgaggtggagtcttgctctgtcacccaggctggagtgcagtggcaggatcttggcccactgcaacgtccacctcccgggttcaagtgattcacctgcctcagcctcccgagtagctgggatcacaggggcctgccaccatgcctggctactttttgtatttttagtagagatggggttttaccatgttggtcagtctagtcttgaactcctgacctcaggtgatcggcccgcctcggcctcccaaagtgctgggattacaggcgtgagccaccgcacccggcctatcatcctcattactttttatttattttcattcttctctttctttttgtgtttttttcttcccctctcttcctctctcctatgtcatgcatgctgtctctttttctgtcttttcttagctcttcttcccctctccaccccttctcttcccttgtattagttccctgttgctgctgtaatatattaccacgaactcagtggctccaaacaacacaaactcactgtcttaccgttctggaggtcagaaatttgaaatgaggccaggcattgtggctcacgcctataaacctagcactttgggaggccaaggcaggaggatggcttgaggccaggagttccggatcagcctggacagcatagtgagacctcatcttaaagaaagaaaaagaaattagaaatgagttttacaggccaaattaaggctgtgttccttctggaggctccaggaaagaatctgtttccctgccttttccagctgctagagctgggcccacctgcatccatctccctatctcaagactaacgttaggcaggccgggcgaggtggctaacacctgtaatctcagcacttcgggaggctaaagcaggaagattgagcctgggagttcaagaccagactgggcaacatagtgagacccccatctctacaaaaaaaatgcaaaaagtagccaggcagggcacacacctgtagtcccagctactcaggaggctgagtcaggaggattgcttgagcctgggaggtcaagtctgtggtgagccatgattgaaccactgcactctagtctgcgtgacagagcgagagcctgcctcaaaaaacaaacaacaaaacaaacaaaaaacttctaatgtcatcatatctgcaaagtccctttagccacgtaagagaccatatctacagattccgggaattaggatgtggacatctttgggggtcattattcaacccaccacactcctcttgttctgtttcttactccttttctctcggttacaatccttctcgacatcttgctggctttgttcctgtgtcctctgctgctacttccctctgcctaccctctctctcacccagtagcatcctgaccagaccccactccgccccacccccaggattgcagaagtggctggctatagtcccgatgacctgatcggctgttccgcctacgagtacatccacgcgctggactccgatgcggtcagcaagagcatccacacctgtatgtatcccatttccccaggtgcgaagccagctgccacatggcccccagctgacaccaggaccccccagctccccataccccaggatgcactgcctccccacctcaacaccagctccctgctccccaagccccaaggaactgtctccttccttgccccctcatacccagtccccagatatttctctccccatttgcccccttggtggccctgatccctcccgatccccctcctcagtgctgagcaagggccaggcagtaacagggcagtatcgcttcctggcccggagtggtggctacctgtggacccagacccaggccacagtggtgtcagggggacggggcccccagtcggagagtatcgtctgtgtccattttttaatcaggtaagcaggaggaggggctggggtggctgtgtgtgggcctgatctgcatgtgtggacaggtgtgtgtgtgtgtgtgtgtgtgtgcgtatgagcatgcatgtgtatcatgcataagtgtatgtgagggagtgtgcacgtgtacacatatgaggaatgtgtgtcaccatgtaaatgccggtgtgtgtgtctgcatggacacaggtatgtgtatgggtgtgtagactgttaatttttttttttttttttttttttttttttgcgtgaacctctgcttaagtggattgttaattcaaattagaaaggggtctttatttggcctggcatggtggctcatgcctgtaatcctagcactttgggaggctgaggtgggcggattgcctgagctcaggagttcgaaaccagcctgggcaacatgacgaaatgctgtttctactaataataccaaaaattagccgggtgtggtgacacatgcctgtaatcccaactactcgggaggctgaggcacgagaatcattagaacccaggtggtggaggctgcagtgagccgagattgcgtcagtgcactctggcctcggcaacagagcgagactctgtctcaaacaaacaaacaaacaaacaaacaaaaggactctatattcaagttaaaataagaagtgtaacagaatcatggggtcttttttgctttttaaattttgatgtggctcacacctgtaaatcccagaactttgggaggccaggggaggaggattgctagagcctgggggttcaagaccagcctgggcaaagtggttaggacccattctcaaaaaaaaaaaaaaaaaaaaacctgaaaacagaccaaaaaaaaaaaccacacacacgcaaagatagatggtttgcatatggtaaattctctttatggtacacagttctgtgaatttttgacacacgcatgcagttgtgtaaccactatcacaatccagctattgaccaattagtgtgattataatagtggttacacaattaccacgattttttttttttttttttgagacagagttttgccctcgtcactcaggctggattgcactggcacgatctcggctcacttcaacctctgcctcccaggttcaagcgattctcctgcttcagcctcccgactagctgggattacacgcaacaacacgcccagctaatttttatatttttaatagagaaggagtttcaccaggttggccggtctggtctcgaactcctgacctcaggtgatccacccccctcagcctcccaaagtgttgggattacaggcatgagccactgcacccggcccatgttgtggtttatatcagtagttcctttgtaaatagtgaacagtattccatggtatgaatagagcacaggttttttttttatccattcaccagttagaagacattgggctgtttccaagtttgggtgattacaaaaaaacagctactgtaaacattctcatacaagattttatgagatcacatgttttcatttctcttgggtaaacagctaggattggaatggatgggttatatagtaagtgtatatttaatctaagaaactgccatggctgggcacagtggctcacgcctgtaatcccagcactttgggaagccaaggaaggaggatgactagagcctctgaggtgaagaccagcctgggcaaagtggttaagactcaaccgcaaaaaaagaaaaacagaaaacctgaaaacaaaccaaaaaaaaaaaacaaacacaaaaatatatatggttttcatgcagtaaattctgtttatggtacacagttctgtgaattttgacacatgcatgcaattgtgtaaccactatcacaatccagctattgaccaattagtgtggttacacaattaccacaatttatttatttttatttttatttatttattttttttgagacagagttttgcccttgtcactcaggctggagtgcactggcacgatctcggctcacttcaacttccgcctcccgggttcaagcaattcttctgcttcagcctcctgagtagctgggattacagctgggattacaccaagcccagctaatttttgtatttttagtagagtcggggtttcaccatgttggccaggctggtctcgaactcctgacctcaggtgatccacccgcctcagcctcccaaagtgctgggattataggcatgagccaccacacccggccattaccacgattttttacacaaaaatattctcttgtagtaaacccctcccacactcccatgtccctggcaaccactgtcctcagaccccagagttttgctttttccagagggtcacatacagggaatcctacagtatgtagccttttgggcctggctcttacttagcttgatatatttaaaattcctccatgttgtggtttttctttcttggtttttttgttttgtttttgagacagagtctcattctgttgcccaggagtgcactggtgcaatctcggctcactacagcctccgcctctgaggttcaagtgattctcctgcctcagcctcctgagtggctgggattataggcgcgcaccaacacgcccagctaatttttatatttttaatagagaaggagtttcaccagattggccaggctggtctcgaactcctgacctcaggtgatcctcctgcctcagcctcccaaagtgctggaattacaggcgtgagccaccgcgcccagcccatgttgtggtttatatcagtagttcctttgtaaatagtgaacagtattccatggtatgaatagagcacagtttttttatccattcaccagttggaagacgctgggctgtttccaagtttgggtgattagaaaaaaacagctactgtaaacattctcatacaagattttatgagatcacatgttttcatttctcttgggtaaacagctaggattggaatggataggttatatagtaactgtatatttaatctaagaaactgccatggctgggcacagtggctgatgcctgtaatcccagcactttgggaggccgaggagggcagatcagttgaggccaggagtttgagaccagcctggccaacatggcgaaacaccgtctccactgaaaatacaaaaattagccaggtgtggtagcacatgcttgtgaccccagctgcttgggaggccgagacatgagaatcacttgaacccaggaggtggaggttgcagtgagctgagatcacaccgctgcactctagcctgggtgacagagtgagattctgtctcaaaaaattaaaaaaaagaaagaaagaaacagccaggacagggtgcggtggctcatgcctgtaatcccagcactttgggagtccaaggtgggtggatcacctgaggtcaggagttctggaccagcctggtcaacatggtgaaactccatctctactaaaaatacaaaaattagcttggtgtggtggtgcatgcctgtagtgccagctactcaggaggctgaggcaggagaatcacttgaacctgggaggcagaggttgcagtgagctgagatcaggccactgcactccagcctgggcgacagaaggagacaccatttccaaaaaaagaaaaacagaaacagccaaactcttttccaaagtggctgtatcattttgcattcccatcagtaacgtatgggggttccagttgctccacatctgtgccagcatttcgcattgtctgggtgtttgggtttggtgttacttttagtcattctaatagatgtgcagtgggaaaatcacgatggggctttttttttccatcatgtgtcatagaagcttttcaccatttagaaatgcagaggtatccatgacaacattatgaggcagagttagaattacagcttttcggtcgtgcgcagtggctcatgcctataatcccagcactttgggaggctgaggtgggcagatgacttgaggtcaggagttcaagaccaggctgaccaacatggtgaaaccccgtctttactaaaaatacaaaaattagccagatgtggtggcgtgtgcctataatctgagctacttgggaggctgaggcaggagaatcacttgaaccccggaggcagaggttgcaatgagtggagatcagaccactgcactccagcctgggcgacagagtgagactccatctcaaaaaaaaaaaaaaagaaaaaagaattataccttttctttgaagaaggttatcttataggacatgcaccagttttctaaagccttaggggtttttctagatctggaggaatgttctgaaatacaaatcaacatatacatatgtatataaattttttttgaaataaagtcttgctttgtcatgcaggctggagagccgtggcacaaacagggctcgctgcagccctgacccacctgagcctcccaagtagctgggactataggtgcgcactaccatgcctaatttttttttgtattttttgtagagatggagtttcatcatgttgcccaggctggtcttaaactcctgagttcaagcgacccacccgcctcggcttcccaaaatgctgggattacaggtgtgagccctggtacccagcctataattttttaaaaatagggatggggtctcactgtgttgcccaggctggtctcaaactcttgggctcaagtgaccctcccgcctcagcctcccaaagtgctgggattgcagatgtgaaccaccatgccaggcctacaaatcaacttatgcctcatgtctctacccttctcagagcccttctgaagctccccagtatcctcaggagaaaagccaagggcgttggtgtggttcaccaggccctgtgaagctcctgcctccctccccttctcacttaccctccaaatctcagggcctttgcacaggcagttcctccttcccagaatgctctcttctcttccctcctctcctttctcctgagtcatgcccgctcatccttccagtctcagctcagacatcacttctggagaccctctttcctgagcccctacatgagctcaggtgtcccccatgcccattttctctcctggtgtcctgtacttttgcaccagagcacttaaaaccatttgtaattatcctattaacttgtgtgttcagccaggccttcttcgatcgtccttttcaaaattgcaaactcccatcactgctttattttctctgtagtacttaccactatcttttttttttcttctttttttgagacagagtctcattctgttgcccagactggagtgcggtggcacaacctcagctcactgcaatcttagcctcccgggttcaagtgattctcctgtctcaaccttccaagtagggattacaagcacccgccaccacacctggctaatttttgtatttttagtagagatggggtttcactatgttggccgggctggtcttgaactcctgagctcaagtgatccacccacctcagcctcccaaagtgctgggattacaggcgtgagccactgtgcctggccctccctagtattaccactatctaacccaacgttgtccaataaaagcatgatgccagccacatatgtcatttggaattttttttttttttctttgagacagagccttgctctgccacccaggctggaaccacattaaaaaggtaaacggaatgctgggcatggtaactcacacctgtaatcccaacgctttgggaggccaaggccaggagtttgagaatagtcttggcaacatagggagaccccatctttacaaataatttaaaaattaacccagcgtggtggcatatggctgtaatcccagctactcaggaggctgaagcaggaggatcactgagcctgggagattgaggctgcagtgagccgagatcgcaccactgcactccagcctgagcgagagagtgagatcctgtctcaaaaaaaaaaaaaaaaaaaaaagtaaacagaagcaggtgaaattaattttattttttaaatttcattttatttatttatttatttattttgagacagagcctcactctgtcacccaggctggagtgcagtggcgtgatctcggctcactgcagcttccacctctggggttcaagtgattctcctgcctcaacctcctgagtagctgggactacaggcgcatgccaccacactcagctaatttttgtatttttaatagagatggggtttcaccatgtgggccaggctgatcttgaactcctgacctcaggtgatccacctgctttggcctcccaaagtgctgagattacaggtgtgagccaccgcgcctggcctaattttaacaatacattttattttcatattcaagatcacaccactgtgtaagtagcggagctgggatttgaacccaggccactgactacagagtccttgctgtgaaccactacacagcagtgcttgatgaggatatatttgtggaatgatgaatgagttaactgaatgtgtcacacgtgcacatattcgagcccaagtgtatggagcatgtgagcatatgtgtccctatatgcactcaggtgtatgtgagcgctcctgtttgtgcctgtgtgtaccgagtgtgtatacaagttcgattgtgtgtgcttgtatctttcaggggaataagggtggctttgatccagcctaaattgggatgtttccagcccagggagggtttattgagtgtggggagaggtcatagcttctcaaggagctggtgggaagaccaggcccacctgcctcctgtcctgaagggggttatgcagatgagatacaaatgagggcctgatcctcagccccacccaactctccaaaagccaacttgcacagcgagcatttagattgtctctgcagccagagactgtgtgaagggaggtgccagggacataaggatgtatttctaaacctgttcccttgagtatgaaaaacatctatgaatagaaacagcataaataaaatcttattcataaaaattacagccctatgaattcttcctatttggtcatgtaatgaagactatgttaaaaatatattttttcatcaatacctttctaagaatatgtttataagtaaaaatctataaagagaatatttagttattctgaagcctttcgctcaccccgctctttgcccctgggcctcctctctctgttcctaggtctcctcccgcttctgtctttcagtgccgccccacccccttccctcagtcttcctcctctctgcccaggctgtgctaaatgccagctcttttttctgcctttccttttacagaaggagcttgggaagggacaaacttaactttcttttaaaaatggtgtcagaataggccgggcacagtggctcacgcctgtaatcatagcactttgggaggctgaggcaggtggatcacctgaggtcaggagttcgagaccagcctggccaacgtggtgaaaccccgtctctactaaaaatacaaaaattagctgggtatgggggcttgcacctgtaatcccagctactcggaaggctgaggcaggagaatcgcttgaacctgggaggcggaggttgcagtgagccgagatcgcgccactgcactccagcctgggcgacagagtgagaccttgtcttaaaaaaataaaatgctgtcagaataaaaagcagtcaacagaaatgaaacccttataggagacaaataaatgtgggcaattattttctgcaaaatgccctccaagcccctgggcgccattgccttctgtaataggacatcacctgaacaggctttctgggctggagccaaggaccctccctgactcccacctccctttctgccttgtaccccagccaggtggaagagaccggagtggtgctgtccctggagcaaacggagcaacactctcgcagacccattcagcggggcgccccctctcagaaggacacccctaaccctggggacagccttggtatggggcagggctggggccgggaggggttgtgtccccagggcccttgggagaaagcccaagcaccttaacatggctcaccaggccctgtgggacctgcctcctgcctcccttccctgcgcactcagcctccaaaacacacagcctcctaagagcccttggaacactccagcctcgtgcctcagggcctttgcacatgcagtttcctagaatgctcttctctctcctgtcctccctccccttctgtggctatggggtggttgcttcagtctcttgctggcctctgctctaaatcctgctgtggctccacattgcccccacgcttctgcctcttccctgttctggctttgctgctctttggcttccagtaatctcgatcctcctaagtctggctcctttctccctcttccttcactctcctgccatcctggatgagcctccctcccagtctatccttcaagacctcaccttctccaagctgttgctggccacccatgctcctgggtgtggggtgggattgctgatataatatcctttccttttctggctcagagctggctctgggccttgtcttaacctctggggaccttacagcctccttgagggcttggggccagtcttttctcctaaggtgaaagctccccagagctgaatggccaaatgctgttctgagccaccaatcccttcccctcggacctttcagagcctcaccacaatctggccactgaagttcacacctgggctgggagcagtggtttatgcctgcaatcccagcactttgggaggccgaggtgggcggatcacttgaggtcaggagtttgagatcagcctggccaacatggtgaaaccctgtctctataaaaaatacaaaacttagctgggtgtgatggcgggcacctgtaatcccagctactctggagactgaggcaggagaattgctcgaacccaggaggcagaggctgcagtgaactgagatagtgccactgcactccattctgggcaacagagctagactccatctcaaaaataaaaataaagttcacacctggcccagcaggggtcctccaggccccttccttaccctctcactaagaacagtggccatcctgacctgctgaagatgtcaactgtgttcctggggttggtatggagggctctggcccttggccctcagtcaccagcccgtgtcctccccatctccatgtgtcctgcagacacccctggcccccggatccttgccttcctgcacccgccttccctgagcgaggctgccctggccgctgacccccgccgtttctgcagccctgacctccgtcgcctcctgggacccatcctggatggggcttcagtagcagccactcccagcaccccgctggccacacggcacccccaaagtcctctttcggtaagccatcccacccatgtgagccctcagcatccagtgctcagtccctcagggggtcttggcctgtgacttaaacctgactgttctctgggcctcagcttctccatctgtgtagtggggaggttgggatgagatggggttgaggttcctttaagacgcagatccagatttttcaattgttagaattccagagtctggctctgtttagggaaaaactctctcaagctatgtttttcctctgctctcctaataatgcaacaatcgtcaacacagaagaagacttctgtgaccaaatgtgggcagtttttcccacacaccaagcagcggacaccagctgggtgtcctccaattcaattccggcatcatctacctggagatagtgtcagatttcacaggttgggcctcagtccccaagactgctctttgctcttcagacaccagtcacaagtctgggcctccagaatttcttttttatttttatttttattttcgagatggagtctcactctgtcacccaggctggaatgcagtggcgcaatctcggctcactgcaacctccacctccgaggttcaagcaattctcttgcctcagcctcccaagtagctgagattacaggtgcatgccaccacacctggttaattttttgtatttttagtagaggcagggtttcaccatgttggccaggctggtctcgagctcctgacatcaagtgatcttccggcctcggcctcccagagtgctgggattacaggtgtgagccaccgtacctggctctttgggtttgattaatttgctggagcggctcacagtaatcaggacaacacttatttaggtttactggttcattgtcaaggatattgcacggatacggatgaagggatacattgagtgaggtatggaggaatgtagggtttcggagcttccatgccgtcccgggcaccaccctccagaaacctccatgggtcagctatctggaagcccctccaacccagtcctcttgggtttttatggaagcttcatgacatcagcattccttcccccagggtatcgggcaggaccctctctggggacagtggttttttttttgttgttttttttttgagacggagttttgctcttatcgcccaggctggagtgcaatggcatgatctcagctcaccacaacctgcgcctcctggattcaagcaatgctcctgcctcagcctcccaagtagctgagattacaggcgcacactaccacgcccagttaatttttttatttttagtagagacggggtttcaccatgtttgtcaggctggtctcgaactcctgacctcatgatccacccgcctcggcctcccaaagtgctaggattacaggcatgagccaccgcgcccggcctctggggacagtcttatgacccacaatcaaaaaggcaggggaagattagagacctgcctttgggcaggtgaaacgagggcagaagaaggctggagaggttctgtttcctgaggcctaacacacccagtgttctaacaaaagactgttagaactgttttactagactgttctaataaaagactgttctaacaaaagacaacggccatgggagtttgacccaggaaccatgcacaaaatcatatatatatatgtgtgtataaaataacaccacaggccctgtattagtctgtcttcacgctgctgctaaagacatacccaagtctgggtaatttataaagaaaaaaagatttaatggactcacggttccacatggctggggaggcctcacaatcatggcggaaggtgaaagatatgtcttacatggcggcaggcaagagagaacgaaaaccaagcgaaaggggtttccccttataaaaccatcagctctcatgagacttattcactatcacgaggacagtatgggagagaccacccccatgattcaattatcgctgaccaggtccctcccacagtgtgtgggaattatgggactatagttcaagatgagatttgggtggggacgcagccaaaccctatcaggcccctaacctgggatgtttggaactggcacagatgaccctcctcccactccagcttgtgactaagcatccagttctctgaactttgacctcaaagagtcaaagtgtctaatatcctgatttatacagacctggattaaatcctaaatctgccatttatcagccacgttaccctggctgggcaagcaagttcttgaggccttaatttcttcacctataaaagaaagataataacatgtcaccacatcattggttattctgagcattaagtgacagtattcatgagaagcactcagtaggggcctggcacctatcggtgctcaacagatcataccagttactatcaatatttgttgtgaagatagtctgacctttgacctcagtgggtccacgttatccagtgttgactgtcttcatccccactctccaccccaagaaaatatcctctctccagagaaatacagactgtgacctttgacctcatcctttacccctgagacagctgaactctccattgtttccccactaaactccaggctccaagacctttaaccccagaggatttgtttgaaagtcttggcctcaggctgggtgcggtggctcatgcctgtactctcagtactttgggaggctgaggtggggagattatctgaggtcaggagttcaagaccagcctgactaacatggtgaaaccctgtcactactaaaaatacagaaattagccaggcgtggtggagggcgcctgtaatcccagctacttgggaggctgaggcaggagaatcacttgaatccaggaggtggaggttgcagtgagctgagaccacgccattgcactccaacctgggtgacagagtaagactccctttcaaaaaaaaagtcttggcctcaagctcatgtttttatttatatatatatatatatacacacacacatatatatatacacatatatatatacatatatatatatatacacatacacacacacacacacatatattgtgtgtgtgtgtgtgtgtgtgtgtgtgtgagacagagtcttactctgtcacccaggctggagtgcggtggcatgatcatagctcactgcagcctctgcttcccaggctcaagccattctcctgcctcagcctccctagtagctaggaccacagatgtgtgccaccacacccagctaatttttgtacttttagtagagacagggtttcaccctgttggccaagctggtctcgaattcctgacctcaagtgatccacccaccttggcctcccaaagtcctgggattacaggtgtgagccactgagcccagccaggctctgatccttctaactggaacttccatgtttgccccatccatctatgtacacccaggcattctgagttttgaacacccaggttcaaaactcatctgcatttgccgttggaccccctttgtgccccagatgcctggcatttgatccccacttctacccttgagctgcagactgtcttaatgttgatacctcccaggctcaagatttcctgaagtttctactccatctctccacaggctgatctcccagatgaactacctgtgggcaccgagaatgtgcacagactcttcacctccgggaaagacactgaggcagtggagacagatttagatatagctcaggtaagggctggcatggaagggagtaatcctcagccctgtgttctggggattcacatatgtggctttagagaagggtagtgggatggttaaaggaatgaatggatggatggatggaccattgtattcattaggtggatgatggtggatgaatggatgaggtttaggcagatattttaatggatggatagatgggtgggtaggtggatgaatgtttggatggatattttgatagctggatgaaaaatggataggtgatacttggatggatgatttattgaatgcatagataaaatgacagcagcatgatgtattagttatctactgttgtgtaacaaattgcctaaaaacttaacaccttaaaacaacaactatttattatgtcacatggtgactgaatatcagaaattcaggagcaccttatctgctggtttttgctgagtctctcatgaggttgaagtcaaactctcagtcagggctacagtcatctggggttagagggttttcttccaagctcacacacatgaggttgttggcaggcctcaatccctcactttgctttggctggaggcctcagttcctcatcacgtgaacctctacatagactccctaagtgtcctcacaacatggcagttggcttccctaaggcaaacaatccaacaaagagaaaaagggacaaatggagaagtagagagatagaaagtacaagtcccagactgaagacacagtctttcatggcctaatctcagaagtgacaaatcatcgcttctgccatattgttttggtcatatagatcaatcctgtacactgtgggaggcaataacataagagtgtgaacatcaagaggcagggatcattgggaacttccaatgattgatgtctctccctcatgcaaaatacactcacccacctctcaaggccccccaaagtctcccaaagtttcttccccttacagcatcagcttgaagtccagaatctgatcatctgaatctggtcttggtgctggggaagctccttgagtacagttcctctcaacattttggcttgtggactaatggggacaagtcatctgtcacccacatactcaatatacagtggtgagacaggaatagacactactattcaaaaaggaggggtaagaggggcatgcatatatccctggtccatagcagttttgaaatccatatgggaaaatatcacaagttctttcattaggactttaaaaaaaaactgggggccaggcgtggtggctcacgcctgtaatcccagctctttgggaggccgaggcaggtggatcttgaggtcaggagatcaagaccgttctggccaacatggtgaaaccctgtctctactaaaaataaaaataaaattagctaggtgtggtggcacatgcctgtaatcccagctactcgggaggctgaggccagagaatcacttgaaccagggaggcagaggttgcagtgagccgagattgtgccactgcactccagcctgatgacagagctagacttttgtcccaaaaaaaatatatatatatataaaaatagagacagggtctcagcccaggctggtcttgaactcccaggctcaacctcccaaagtgctgggattagaggtgtgagccactgtgcctggcccaagggtgctcttcattgctctgagaccactttttttttcttttttctttttttttttttgaaatggagcctcactctatcacccaagctggaattcagtgacgcaatcttggctcactgcaacttccaactcccaggttcaagtgattctctggcgtcagcctcctgagtagctgggactacaggtgcccactaccatgcccagccaatttttcgtatttttagtagagatgtggtttcaccaggctggctcagagaccacttattaatgttagcatcatttgccatctggagggctcctgcagtcagccaaactcaaggttaatggcatggttctccagactgccaagtctgcccaagacttctgacatcagacacaagtttgagggtccccagggtcacccttactttagaccagctgcctaccaatgtggagattcccagactcctgtagactccctcaagtttgataatttgctagaagtgttcatggtactcagaaagtgctatacttaagattgtagttttattataatgaaagaatacagatcagaaacagacaaaggaagatattcataggtggaatctgggactggagggtcccagatggaaagttttcttctcctcagggacatgttgtcctcccagtattgacatgtagcaatatgtggagagtaatgccaactcaggaagctcaccaaagcatcagtgttcagagtttttattggggtttcattgcataggcatgattgagcaaattaccgcccatgtaattgaattcagtctccaatgctacctctaccttccctggatccggctgattttgtgcgggccaaagccccaaccctctaatcacaatggtggttctttctgcatggccagcctccatcctgagttatctcattagcaaaaactatctaggggctcaccatgagtcacctggttagcataaactatccaaaggacccacagtgaatagtaaagacactgctatcactcagaacattccagaggtttagaggttaacttccaggagctgggacaaaagccagacctctctttgggtaaagttaattattcactacacaaggaggttgagaatcttcaaaaccttcaagtactatctccttcatgtttaacatttcttcctttaggagaaatatttttttatctctctctcttcttgccttttactataagtaacaagatgaaatcaggcagccccttcaacactctggctgggaatcttagctggatcacctcgtgtatttgttatattttctactttccacataactgcaggcaacagtgttgctaaactttcagccactacaggacaaaaattctctttcctctggtttccagtgatatgtttctcacttctctctaagccctcactgagtcttctcaatgttcagattttgaccaatggtttctttgaggcatttaggtttgtttttttttttgagacagtatttcactctgtcactcaggctggactgcgatggtgtgatcatgctcactgcaacctcaaactcctgggctgaaacaatcctcccacctcagcctcctgagtaattagaactacaggcatgggccaccatacctggctaatttttttccttttttgtgtaggtgggggtctcactatgttacccagactggtctctaatttctagcctcaagtgatgctcccgactcagcctcctaaaagctctgggattacaggtgtgagctaccatgcttctgacccagtttaggatttctctaacatgttcttcagggagtccttatacccattttacagatgaggaaactgaagctcagactgttgaccacaggcacagaactcagaagtgatggtgctgggacttcagccaaggtccacccaagtccaaggctcatcctcttacctccctcctgccctccgcaggatgctgatgctctggatttggagatgctggccccctacatctccatggatgatgacttccagctcaacgccagcgagcagctacccagggcctaccacagacctctgggggctgtcccccggccccgtgctcggagcttccatggcctgtcacctccagcccttgagccctccctgctaccccgctgggggagtgacccccggctgagctgctccagcccttccagaggggacccctcagcatcctctcccatggctggggctcggaagaggtgagccacagtaaaggggggacatcaaggcagcatcccctcaccccgtcttgcccctgcctcctgcttcagcctcatccctcaccatttctctaaccctgatctctgctccagccaggccctcggtgggcccagcacatgccaagtttgtgccaatctctgtgcctttgcctaggctgtacaccccttctggagtgccctccactgctctcactgtttatccaaatcccacctgtcaaccagggctctctcctttggaacatagttatatctgatctggtgacaatttttgtcagagtttagaagacattgccgtgtgtcagagaaactatctaagccgggtgtggtggtgcatgcctgtagtcctagctacttgggaggctgaggtgggaggatctcttgagcccaggagatcgaggctgcagcgagctgtgcttgtgccactgcactccagcctgggcaatggtgagaccctgtcaagaaaaaaaaaaaaaaaaagatagagagagagagagagagtgaagagagaggaaggaagggaggaaggaaagaagaaggaaggaagggaaggagggagggagggagggaaggaatggaaaaaagaaaagaaactgtctagaactaaattgcaagcatgtgctcatttcgaatccagagtggtcttatccttatggatacatcttggtatctcccaaggctcccagcttggtactggctataaagtgggcctgataaatacttattaaatgagggagggagggaattattaatgaatatagttggcactttaatgggtggacaggtggatggatgcataggtcgatggaaggacagatggatggatgtgtaggtgaaagggtgtatgtatgtatgtgtgtatgtctggacggatggatggatgaatgatggatgtctgggtagacagaaggattgatggatgggtcaatggattgatgggtggctgaaaggaaggatagatggtggatggatggatgaatcggatggatggagggatggatggatggatggatggatggatagttggatggatggtggatggatggcagatggatggtggatggatggtggatggatgggtggttggattaatcaatggattaatggatggatgcatggatggtggatggatggatggatggatggtggatggttggcagatgtatggtggatggatggcagatggatggatggatgaatcaatggattaatggatggatggatggtggatggcagatggatggcagatgggatggcagatggatggatgggtggatcagtggatggatggatggatggatggatggatggtggatggctggcagacagatggtggatggatggcagatggatggatggatggatggatgggtggtggatggctgggtggaaggatggatggatagatgaaggacaactaggtggataaataggtggatgaatggaaggataaatggatggaggttgggtgggtgggtgatggatcattggatgaatgagaagatggattggtggatggatggatggactggtgggtgtatgactaaaggaataaataggtgctcaggggagtgaatgaatgctcatcacctgcttacactgttatccacacttgcccaggtttgctgtgtcctgagattcttgcctgttttcctccaggaccctggcccagagctcagaggacgaggacgagggagtggagctgctgggagtgagacctcccaaaaggtcccccagcccagaacacgaaaactttctgctctttcctctcagcctggtgtgttgggggattaatgggattctctggccctcattacctagctggcttaaacctactgttttatagataggaaaccagagaggggcaggggctggttgagggtcatacagaaagtcagtgggccagctgagactaaagcctgatcttctagtttcactaatgggtattaaaaacctctgcagtgaactgagattgcgccactgcaccccagcatgagcgacagaatgggaccttgtcaaaaaaaaaaaaaaaaaaaaaaaaaaaactctgcaaatacatgtaagatggcagtaagtcagctgggcgcggttgctcacgcatgtgatcccaacactttgggaggccgaggcaggtggatcacctgaggtcgggagtttgagaccagcctggccaacatggagataccccgtctctactaaaaatacaaaattagccgggcatggtggcgcatgcctgtaatcccagctactcaggaggctgaggcagaagaattgtttgaacccaggaacagaagattgcagtgagctgagatcgtgccactgcagtccagtctaggcaacaagagtgaaactccgtctcaaaaaaaaaaaaaaaaaaaggcaataagtgcaaagaaggaaaaattaagcaggctaaggggagaaatggcatgtggctggtatctgcagggatcttctctgctcccatgggaccccctccccaaactagaacaggtcttggccttggattactagtgcagagttcaaagtgcagacactagaatcagactgacctgggttcaagtcccaggtctgccacccagtaactgccacctgaccttgggcaggttacgtcaccacgtggagcctcagttgcctcatccagaaagtgggaatagttacatctcacgggactgccatgaggattaaaggaaattaggcccttagctgacactcagtgggctgaccataaatggtgtacaaaaacaaaccaaagggccgggcgctgtggctcacgcctatattcctagcactttgggaggccgaggtgggtggatcacctgaggtcaggagttcgagaccagcctgggcaacatagtaagatgctgtctgtacaaaaaaaaaaaaattaaaatttaagcgggtgtggtggcatgtgcctgtagtcccagctacttaggaggctgcggtgaaagcatcacccgagcctgggaggtcaaggctgtagtgagccatgatcgtgccactgcactccggcctagatgacagcacaagacgctgtctcaaaaaaataaaaataaaaaagccagcctggactatgtcacttctgcaaggcctccctctaggacctttcatggccctctagtgcttacagcagtgccctggttcttcactctgcaaagggttgtttgaatatgagatgtggttgataatataacagtttacaggccagacataatgcctcacgcctgtaatcccagcactttgggaggatgaggcgggataatcacttgaagtctggagttcaagtccagcctggccaacatggtgaaaccctgtctctactaaaaatacaaacgttagccgggtgtaggtgcacacctatagtgccagctactcggaaggctaaggcacaagaattgcttgaactctggaggcagaggttgcagtgagccgagatcgcgccattgcactcctgcctggaggacagggtgaaactccctctcagaaaaaaaaaaaaaacaacctctctctatatatatatatgtatatatgtgtgtatatatatgtatatatgtgtatatacatatataacagcttacacttattaagtgcctaccatgtgccagacactaactgcactaaattccttgcatgattaacttatttaatccccacaactactattgaaatgttcttgttactgttatacacacttacacagaagaagttaaacaactgtatcagagtctgcacaggaaaggcagcacactcagagggagtgttgaggagaatttaataacaggactgttgaaaaaggtgttaacatagtgtagggaaatcagcaagcctggtgcagtaccttggggcacagcatgggaagtgggcatcagccctggcctgaaggtgcagggcggggtggtcactggatcctgcagcgagtggagtccagctaatgagggctgaaaccttccatggagggacaccgccaactcacagagaagaataaataccctacctgctggtgtctcccatgagctaaccaacaggatcacacggagcaaagttgcatgctgtcacggtctctgtgtacaggtcctcgggcgaaggaagaaggagaagggggatgaggccctggaggaacacaagtaggatgactggacagggactgacccaaagtcacaccacaaatgggtggccactggacctcagcatcccttaactactgcaccatcttgtctttggatatatatttttttccttcctttctttttcttttcttttcttttcctttcctttcttttctttctttcttttttttttttttttttttttgagacagagtctcactctgtcgcccaggctggagtgcagtggcgcgatctcggctcactgcaaactccatctcccgggttcacgccattctcctgcctcagcctcccaagtagctgggaccacaggcagctgccaccacgcctggttattttttttgtatttttagtagagacagggtttcaccgtgttatccaggatggtctcaatctcctgacctcgtgatccgcccaactcggcctcccaaagtgctgggattacaggcgtgagccaccgcgcccggcctcttttctttcttttttgagatggagtctcactctgtctaccaggctagagtgcagtggcacgatcttggctcactacaacctcctcctcccaggttgaagcaattctcctacctccgcctcccaagtagctgggattacagacatgcgcaaccacaccctgctaatttttgtatttttagtagagatggagtttcaccatgttggccaggctggtctcgaactcctgacctcgaatgatccacccatctcagcctcccaaagtgctgggattacaggcgtgagccgccatgcccagcttatttcattttttaaatttttttgtagagatagggtctcattatgttgcccaggctgatctcaaactcctgacctcaggtgatcctcctaccttggccttccaaaagcactagaattacaggcatgagccactgcacttgcccttatttttattttacttttatttttatttttattagagataggatctctgtcacccagactggaatgcagtgacacgatcatagctcactgcaacctcagcctcctggtctcaagggatcctctcacctcagcctcctaagtaactaagattacaggcacatgccatcacacccagctaatttttaaatttttgtagagatgagatctcactatcttgcccaggctggtctcaaacgtttgggcttaagtgatcctcccaatcctctggcctcagcccccgaaagtgctgggattacagtcaccactcccggctgttccttggatactaatgatgatgatgatggtggtggctttgtctctctcccacagagtttccttctgacaggaggaccagccccagggagcctgcaggaccccagcaccccactcctgaacctgaatgagcccctgggtgagtagcaacctgggtatccagagccccagagcaccttctcccccgggaggtgcgagagggatggagccattccaaaggtgctgggggactgtcagtgcttggaggtgaccttggtggaaacggcagctcctgtctcttctctcttctcatgggcactgtggaggagagagcccctaagggaggcaggggctctccaaggctgccttttggggtggaagcccgagcctaggtctctggagcctgcacgcctatgatcacatttatttatttatttatttatttatttatttattttttgagatgaagtctcactcttgtcgcccaggctggagtgcagtggcatgatctcggctcactgcaacctccgcctcccaggttcaagtggttctcctgcctcagcctcccaagtagctgggatcacaggtgtgtgccaccacacctggctaatttttgtatttttagtagagatgaggtttcgccatgttggccaggctggtctcgaactcctgacctcaggtgatctgcctgccttgacctctcaatgtgctggaattacaggtgtgagccactgcacccagcctaaaaatttttttttaattggctgggcatggtggtgcatgcctatagttccagctactctggaggctgaggtgggagggtcacttgagcctgggagttcaaggctgcagtgagctatgatggtgccactgcattccagtctgggcaacacagcgagaccctgtctcaaataaaaaagagtgcaagagggcagggtgagtgtttcctgcctgtaatcacagtgttttgggaggctatggaggggaggatcacttgagaccaggggttcgagaccagcctgggaaacatggcaaaaccccgtctctacaaaaaatttttaaaaacctggtgagtgtggtggcacgcacctgttgtcctagttacttgggaggctgagacgggaggattgcttaagcccaggagttcgaggctgcagtgagctgtgactgcaccactgtactccaacctgcgtgacagggcgagatcctgtctctatttatttattttcacatttttattttctttctctctctctctcttttttttttttttttttttttttttgagacagagtctcgctctgccacccaggctggagtgcagccgtgcgatcttggctcactgcaggctctgcccccaggttcacgccattctctggcctcagcctcccgagtaactgggactacaggcgcccgccacctcgcctggcaaattttttgtatttttagtagagacagggtttcaccatgttagccaggatggtctcaatctcctaacctcatgatccgcccacctcggcctcccagagtgctgggattacaggctttctcttttttttgagaagggtctcgctctgtcactcaggctggagtgcagtggtgcactgtcagctcactgcagcctctgtgtccccgggctcaagcgatcctcccacctcagcctcccaagtagctgggactgcaggtgggcaccagcacacttgactttgtgtgtttgtgtgcgtgtgtgtgtgtgtgtttagtagagacagaatttcaccacgttgcccaggctggtcttgaactcctgagctcaagcgatccactcatctcagtttcccaaagtgctgggattacaggcgtgagccaccgcaccaggcccctgtctctaaacaaacagtccaggtgcagtggctcatgcctggaatcctagcactttgggaggctgaggcaggcggaccacctgaggtgaggagttcaagaccagcctggccaacatggtgaaaccctgtctctactaaaaatacaaaaattagccaggcacactggcaggcgcctgtaatcccaactactcgggaggctgagacaggagaatcacttgagcccaggaggcagaggttgcagtgagctgagatcacgccattgtactgcagcctgggcaacacagcaagactctgtctcaaaaaatataaatataaatataaacaaatgaacaaaaaagagtgggagatgaaaataagtgtaacggggaaataatgcatgcaaggaaaaaggtttggagtagggggatttcagttttaaacagtatgatcagggtggtttcattgagaaggtgatagctgagcaaagacctggagtgagtcctgacgatatcggggggaagagtgtcccaggcagagagaacagcaagtgcaaaggcccttaggtggggactgtatctatcttttttggggtgtggggggacagggtgtgtcttgctctgttgcccaggctggagcacagtggtgcgatcacagctcactgcagccttgaactcctgggctcaagcgatcctcccatctcagtctcccaagtagctgggactacacttgtagctgggactacaagtgcgcttcattacgtctggctaattttttaatttctgtagagaaagaggtcttgctatgttgctcaggctggtctcaaactcctgggctcaagtgatcctcctgcctcagccttccaaagtgctgagattgtgcctggctgtctctgtcttctttggggaaaagcaaggccaatgtagctgaagcagagaggagagaaaggtgagggctgactgcatggagcctctgtggggcattgtgatggctttgaagtcaccttgcttgaggaggctgcctcagggcctttgcatatcctgatccttctgcctggcatacttttccctctgttctttgccatgttaccacatcctttagatctcaaaccaaatattactccttacacaaagccctgcctaacttcatacgctcatggtttataacactccataattacacaggcctttgtgtcataatttgatgactgtctgtcttctcctttgggtatgagaccttcaagggcaggggccagggctgtctgggtccctgctgttctcttctttgtgcacatgggtgggcggtggctaagcacagaggaagttctcagcacatatttgtgaatgaggagctaagattcacgcactcgcactgtgcctagctttgtgctaaatcctctatgcacctgatccaattggcgcttctcactggagtgtcggtcccataagggcagggagattcatccatcctggtcactgctgtgtctctagcacctggcacagtgcctgacacaaagtaggtgctcagtaaacatgttgggttttttgttgtttttgagataggttttcactttgtcacccagtctggagtgcagtggcacaaacacagctcaccgcagcctcgacctcctgggctcaagtgatcctcctacttcagctcccacaagtagctgggactgcagctatgtgccatcatgcctggctgatgtttatatgttttgtagagacgaggtttcaccatgttgcccaggctggtcttgaactcctgagttcaagcgatccacctgccttggcctcccaaagtgctgggattactggtatgaaccaccacgcccgacagtaaatatgttttgaatgaataaactctcataaatgaagtatgtgtgagtatcctggtttcccaagtaacaacagctgacttaactgctttctcaccagtactagttatggttcaaaacaccttccatggatttactcatttattcctcacaacagaggagtaaatcaagagggaggtgctgttattagcccgtcttacagatgagggaactgaggcacagagagatgaagccacctgccccaggtcacacagcaagtaaatagcaatgcctggattcaaactagggcagcatctgactctggactcgggttcttcaccgcagccctgaacaccccagagaggttcagagagcagaacgtgcccaagacgtcactgccgtttgaatccagacaggcttgcctcaccacccaggcttttaactgccaggaaggggagacgggttggtgtgggatatgatgaggtttctcttcaaataacccgatcaatcttttattctttaattgatagtaccccccacctttttcccttcttctcctcttttcctttttgcctttgttaaatgcccagacacgccacaataccaggcgttatcaataccagctcacattcctttccttatttaaaaaaaggactaactttctaactcatcacagacaccccttcccctttcctctctgctttcttttacgtgtccaccttatctaaaaaaaaatcaaatgtttagccaaccgaaattagtttaaattgtataacccgaccccagccaataaaaaaaaagtacaaaaacaagacttgcgtcaaaaataaaggctcttgtgcccctttgttccagtgtgctctcatggcaactagccaaagaggcacccctctgcgcaaaagtaaaattactaaaaatcctttgttcgagtgttcaatttccttaagattttaaacattattcctgacattggggttatggttgtcctgtgatttatctttcgtcttttacctttcatttatcatttatctttcatctttgcaggcctgggcccctcactgctctctccgtactcagacgaggacactacccagcccgggggccccttccagccaagggcaggctcagcccaggctgactgagccggctcctctccccatctgccttctcctcccccagaaaggacctcaaccacactccacgccggcagccaacgcacaggatgggggcgccaggagaggggcccctctctcctctatgtaccccctgcccacctcgggcctacctcagccctcacccctctgcctgctcccaatctgggggctctctggggtggtctcagctcagtgacctctgggaggtggtccctggccccctcctccttctctcaggatttctcttggggttctcaatacttggttacctcattatccctttctctgcctctcttggctttattttggggaatcaggggtgaggagggttgggggggtcatatctgtgtttccaggttctggggagaacaatgatccacgggtcaacgtgatcacatttccttctatccttcttgtattattatttttatttttgtcaatttcatgatatggtttttaatcatgatgaattgcctggggtctgtaagaatgtgggactctgatcttccccctcttcaggtgtcagtgcggagaggctctgggccagacctcacccccagtgacttccgattgaggccaaagaccccaagctgcccgccagctctgactgccccttgcgctctgggcttcctgccgcccccagctttgcctggacactgacttcattcatggtcctcctacttcaggggcagcctcccagttcctctgcttccaaactatgcaacctccaacctgctccagttccagactgtataacctctgacctgcactggttctagaccacacaacctccaatgtggtctgctttagatcaccttcttcttcttccttcttcctcttcctcttcctcctgctcctcttcctcttcttcttcttttttttttttgacagagtcttgctctgtcacccaggctggagtgcagtggcgcgatttcagcttactgcagcctccgcgccctgggttcaagtgattctcctgcctcaacttcccaaatagccgggactacgggcatgtgccacattgcccggctaatttttgtatttttagtagagatggggtttcaccacgttgtccagtctggtctcgaactcctgacctcaagtgctccacctgcctcagccttccaaagtgctgggattacaggcgtgagccactgcacccggctagaactcactttctccaaatccctctgcttcgaatttcaccgtcttcagctctttctagttctgggcctcaccagcctctcattctgcctgttttcaaaccttacgatccccaaaaattgtctggttctgggcctctaactccctctggctctatagtctatgactaccagattcttttggttctagaattcactaacttcctctggttctagacctcttcctataaattaatccctcttgttttagatctcacaccctccaacgccctccggttccagatcttatattcagtgatttcctctggttctggaccccacaactccaagcttcctattggttccagttctcctgatcggtaatacatttggttccaaatccagacctcttaatctctctctttttttttttttttttttgagacagagtcccactctgtcacccaggctggagtacagtggctcaatctcggctcactgcagcctccacctcctgggttcaagcaattcttgggcctcagcctcccaaatagctgggattacaggcatgtgccaccacgcccagctaagttttatatttttagtagagacagtgtttcaccatgttggccaggctggtcttgaactcccgacctcaactgatccacccgcctcagcctcccaaagtgctgaaattacaggagtgagcctggccagacttcttaatttctaaatcacttttgttttagaccttatgaggctcagcttattcttctgcagttctctataaccaagactcattttctctcatcaaaaacaagtacagagagtttgatgtgtttatctcttttttcttcctcttcttttttttttttttcttttttgagatggagtctctctctgttgcccaggctggagtataatggtgccatctaggctcactgcaacctccgcctcctgattcaagtgattctcctgcctcagcctcctaaattggtgggattacaggagcccaccaccacatccggctacctttgtgtattttttagtagagacggggttttgccaagttggaggggctggtcttgaactcttgacctcagatgatccacccgcctcagcctcccaaagtgctgggattacaggcataagccaccgtgcccgaccctgtccttatcttataataaccagttcttctagaaccagacgatgctctagttctcctagattctgaacctcatgacctgtaccactcactagttccagactacacaacttctagaaggtgccacctccagggtcctgattcaagatctggtgatctgctgtttctctggttctagaactgacttacaagtgccttctgattctagacctcattccgtaagttcccttggctctagacttcatcatttccagctcctcctcactcaagatctgactccaaattaccctgggtctagaattcagccttcaaatatcttctgattttagactttgccttatacatttctctggttttagatcttaccaccctcaactccttctgattctagatcttatggttcccaaatctctctggttctagaactcagattttaggcttttgtttttccttttttttgttaaaaaaaaaaaaatagagacggggtttcaccatgttgcccaggctggtcgcgaactactgagctcaagcaattctccctccttggcctcaccaaagtgctgggactacaggcatgagccactgagcccagccaggctttttctaattctatgctttattctataaattcctctgcttctaagcctcacagcttccaactgcctttgatttcagatccaaattcctctgattctataattcagcctccaaatgcttctgattctggaatctagacttttccctaaagattcctctggttctgaatcttataacctcaactccctaattccagaccccagcctcctaaatctattctgggcttcccaccccactgaacttacccaattccttctttcagtcttaagttttcccattctaaacccctaccctctaggctgtgctgctcctggacttcatgcctctccattctcattgcctacaatctctgtgccccagaaccccctccacttcccaccccagccctccagacatgcacttaccttgactttaccccacatgtttggggcacctggggctccctcaccccttgggtggtttgcaatctgaagacttctccagccacacaggcacatgcacaggcacggtgctgtctgcatattgccaggtggggagagaagccaggacccctcagctgtctgccaccatctatgtgcctcccttaccccccagctttctttctacagatggtgctactcttggtctcccacaggaaaaggcctccccccttcttagccccatttaccccgtttgtggaaggcactgctcgctctgttttgtcagagagtggcctatccagattggtgctatgggggggtctgacccctccctcctccctctggaggtgatgtgggccctcaatggagggaattgtgctgggctagggaaaggggagggactagactggccacactggctctgaaactcaccaatctctatacaccataaagacctcaccttggtaggcaccagagctctgcgtgttgactcatcttttggatctcctctgggagtgtgggtgcactggtggctgagtgtctttttttttttccttccttccttccttccttccttccttccttccttccttccttccgctctctctctttcttttctttttttttttttcttggagtctcactctgttgcccaggctggagtgcagtggcacaatctctgctcactgcaacctccactacccaggttcaagcgattctcctgcctccgtctcccaagtagctgggatttcaggcatgtgccaccacacccagctaatttttgtgtttttaatagagatggggtttcaccacattggtcaggctggtctcgaactcctgaactcaggtaatctgcccgcctcggcctcccaaagtgctgggattgcaggcatgagccaccatgccaggccctttctttctttcgagacagggtctcactatctcacccaagctggagtgcagtggtgtgatcacggctcactgcagcctcctgggctcaagcaatcctcccatctcacccttcccggtagctgggactacaggtgcatgacacgaggcccagctaattattttcatttttttgtagagacagagccttaccatgttgcccaggctggtctcaaactcctgggtttaagcgatcctcctgcctcagcctcccaaagttctaggattataggcttgagccactgcaccagccccatgttactttctgattctgtgtatctgtatgtgtgtgtgtgtgtgcatgcacacgagtgtgtgcacagtgtcattctgtgtatgtgtatgggtctttgtcacattctgtgaacctgtgttgcagcaggtgggtggggttgtgattccttctacaagtgcatattagtatctgggtgaagtgattctgccttatgtgtgtttctggttattttgggtttctgtgtttctgagtgtggaaggtgctgtgattttttttttttttttttgcctatgtatgtctgtatgatgtgattctgtgtacatgtgtgggactgcttgatgctataattctgggtaccaatgtgtgtgtgacatgattgcccatagttaagtgagcatgtgtgtgcaagagtgtgtgtccatggactcatgtgcaggtgggtgtgtctgttgtcatgtacgtcactctcataaccccccatacagggttgcacataggaatctcttcaagggaagaaaaacactctcaagcctttgcacttcctattcttctgcctgaaatgcctctctcccttcccctctcccctcacttggttacctcctactcatatttcacatcttggtttaggtaacagctactccaggaagccttccctgcctgctccaattgggtaaagtgcccctaaaagctccccttggaagccccctcccatcacagcactaggcactctgcccaactctgaatatttgttttgttttatttgttttttgagacagagtctcactctgtagcccaggctgtcgtgcagtggcgcgatctcggctcactgcagcctccgcctcctaggttcaagcaattctcctgcctcaacctccctaataactgggactataggtgcgcaccatcatgcccagctaaatttttgtatttctggtagtgacggggttttgccatgttggccaggctggtcttgaacttctgacctcaagtgatctgcctgctttggcctcccaaagtgcttcgattacaggcatgagctaccatacccagcccactttgagtatttgtgatggagtgaatataaaagtactactctgtgtcaggctccctgacaaatgctgtactcatgttgtcgaactctcctctaatcctgtatgatggggataattattatccccactttacagaggttgaaactgaggcttagaagagggtgatcacttgcccaaggtcacagtgtcaggaaggattccgctggactcgaaaccagaattcaaatccactatggcagctccttttcccccaaccccaaaacaaacaatacgaacaaacaaaagaaaaatttactaacccaccaagatgggctctggcacctacagaggcagtagagtggcaatgaaggacataggaattagatgggattcctgatcctggctctgtcaccttcttatgttgttgtgaccttcgtcaaacacctctgcaagtctgtgtctttatctgtaaaatggagatgatactaatatctgccctttagggtgattgttggttgtgctgggggccagtaggagagatggggttggactaacaagaggtttgggagtgggatagataggtttaggagtgtgcttccaggaggggatccagagccttacaggacttagtgctacatgagggcttagaaaggacagactggaagcgtgtacggcgggtggggattggcaaaggggtggaatctggatattagactattcagcctgaggttaagactattcagggtctcctaatcaggagtttgggttttctcctaagggtgctggggccatggaagcctgggagcgagagtgtgccatggttttatcatgtcttagaaagatccctcggccgggcacggtggctcacgcctgtaatcccagcactttgggaggccgaggcgggcggatagcttgaggtcggcagttcgaggccagcctggccaacgtggtgaaacccgtttctactaaaatacaaaaattagccgggcatggtggcgggcgcctgtaatcccagctacttgggaggctgaggcagaagaatcgcttaaaccgggaggcggaggttgcagtgagcctagatggcgccactgcactccagcctgggcgacagagggagactccctctcaaaaaaaaaaaaaaaaaaaaaaaaatgtgaagggtaaactggagggaggcagagtgcatgcaatcaatgctgtgatctcagacaagagaatctgtaaaaacacaaacaggagagtttatttgaagattcaggatttgggaagctgaacacaggaagaaaggagatggtgcaacacacttctaagccttgctcaggacttgaaatccagagtgccttcagttaaaaactcaaacactgaccctcaaggttggaccctttttggcttgagaaaccactaatttttcagagatgggtaactgagaccctagagaggaagggaagatttgttcaaggtcacacaggtagtcgacaatagggctcgacgcccgggtccggctccgcgtagggcatggcgctgccttgcaaaacagccacacccgccagcgacattcacaacccaccccccaaccctagaggacagcggggaaatcccactttcagaaccgagaaactttttacagccttggaacacggtaactttgggaggagaggccacaccaggtctgtttccccgcgcgccccttctctcattccctattggctctctctaccaggggtaccgtctggggaacctctggtcaccttgtcctccgcgcgctctgtggcgaaagggacctgcgcaggcgcgtgaagggcgccttcagggcccgcgctttacgacacttgtgcggcagcggcggcggccacccggcgctccttcgcgacggttcggccgggtgccgctggcggccgttgccagggtaggggtcgctttgcggcatggcgatggcggagggcgagaggactgagtgtgctgagcccccccgggacgaacccccggctgatggagctctgaagcgggcagaggagctcaagactcaggccaatgactacttcaaaggtgcgcccgcctggcagggagggtggacagtggcccaggctgaggggtgccgggcccgcgcggaaccatagcaacgcggagctgcagcctgggcgcggggcagacactaccaagtgaccgggcgtggggaggcccaggatggcgctgccaaggagcgacatagggggcttcggagagtgatacctaggagtggcgtgcggagcgggtgctactcagtggagagactgaggagggcgccaccaattgtggggcgagagggggactggaatgagggcgctaccaaacgtgaggcctgtagagggcgctaccaggcagtgacatgtggtgggggagtgattgatggcgctaccaaatggggagtcctggggtgggtgccgccaagtggggggtagagggggcacagccccaatagagaaggcaatcgtgggggtggggaatggatcattagatggggggaacaaggaagtaggagatttgggctgacccgaggaaaaggaatgtgatggtgggggccttgggagtaagggtggggatccttaagaatagtatcacttagaatattgagagtcaagtgtggggcacccattcattcattaattcaacaaatatttattgagtacctgttatgtgccaaggactgtgcttgactttggggatatagcagtgaatgagacagatgtggccctgtccttagcttgtaattttgcaggtgaaccagacatgaaaaaaaaaaaaacaaaaaaaaaccatgtaaataagtaaaatacttaaattgtgatgagtgctttgaaagcaaaccagcagtgtgatgaagtagagaataagggttggaggctactttagatagggtagtgggggaaggccttactgagcaggaggcgtttaagctgaaactcacagagggagaactggagaggagtgttccagggaggtaaagcagcctgtgcaaaggccctgggatggggaatgaaagggtactggcatggctggggctttggctacttagggggagaccaataacaagatgagattaggacagaggccagatcatgcagggtctccgtgagtcattacaaagaccagtttggaattttttttttttttttttttttgagacgggagttttgctctttttgcccaggctagagtgcaatggcgcaatctcggctcactgcaacctccgcctccctggttcaagcgattctcctgcctcagcctcccgagtagctgggattatagacgcacaccaccatgcccagataatttttgtacttttagtagagatggggtttcgccatgttggccaggctggtgtcgaacctctgaccgcaggtgatccgcccatctcggcctctcaaagtgctgggattacaggcatgagccaccacgcccagccctacaagaagacacattaagtaaatgggccagtctggactggagaagaatttgggtgtgatcaaactatggttgggaatggatgagatcatctagtaagagggtctagaggggggacttaggacagaacccaaatggaagagggtgaggctaaggaggagcacttagtgaggtggaaaggaagccaggaaaggtgtcgggaaggctgagagaagggagcgcttctagaacaaggagctggtgcctttagtccgatgctgccaaggcaagcactggccattggctttggctccatggatgctggtagtgatgttgacaggagcagttattggggagtgatgggggtgatgcagccaggaggtgctgaagagtgaatgggaggggaggaagtggagacagcaaatgttaagtgttaggagtattggttctgaaggggagtggagaaatgggggagggtggtaagacgagaacgtgcacaggagttcgagaccaacctggccaacatggtgaaacgacgtctctgctgaaaaaattagttgggtgtggtggcacacacctgtagtcccagctacttgggaggctgaggcaggagaattgcttgatccttggaggcagaggctgcagtgagccaagatcacaccactgcattccagcctgggcaacagactccgtctcaagaaaaaaaaaaagagagaagatgcagtgtcagggaaagatggattttttgtaaggatggaagagagtagagtccaatagagatggagaattgattctgcacaggagaggggggacttgcagcagcaaaaccctggagaaggcggaggtgggaagggtctggagccctggaagagacttggcctccaacgggagcagaagcaaagtgtggagaagctcgatccggtgggagccgtgagagggaggtaggaccagtgagagatgaggccagaggtagaaccttggaagtcagattggggaatatgggtgtcatcctgggggtggtcgatgccatgggaagtttcaagagcggggtgctgtggttcagttagtgttcagaaaagatccctggctgccatgcagagactggactccagggtaagacaggaaggagtctagattagtggacaggtgaggaggggtggtgatcgccagccaggctggagggacagaaatagattcaagaagtgtttcagggaggaagtgagagtggctgcctggagagagggtggacggtactccaggcagggaaaaaaaaaacaaaaacaggtggcaaaggcccaaaggtgagcagagccaggcatggaggccataagtggggccacagcgtaggaggctggaggaggttatgatgagtttgcagggagtagattgcgcagggctgtaggaaggagccagggctttctggggtggggtggcggtggggggtggggctctggggagccctgggaggttctgagtagggaaaggacagggtcaggtttgtgttttaggaacacccctctggaggggcaggacaagaggctgcgaggccaggtggaggctgagccaggaacctgggcaggagaggccagaccagggctgggtggggctggagggtgagaagggagtggctgaatctgagagatgttcaggaggctgacttggcagaataagtgaagtgactaccgggctttgggggctgagggatggagaggagtccaggatgaggctgtctcagccaggtgatggggtggaaggtggaattccctgggatgggagcagcctgcatgggggttgctgctgaggccgcatcagaattctgggccacagcagccattgggaggagcctgttgccccccaggacctgggatccaggctctcaggagtcctggggctgggcaggcagccagaggggcctggcactgagctggcacggaggagaacggccctgctggcccaggccccttgctgtctgtcaggcagtagcaggcacagagccccaggctccagggctgtgggaataacaataaaaaagaataatgacagctcaccttaattgagccttgtggccaggtacgctgtggggtttaatcctccccgggggctgggagatggctaggagtggccctgtttgttttataaaggaagcaaggctcggagaagtgaaaaaaccactcgcccaaggtcagagtgtgtgagcagcagggcccggatatccccttcctcgccacgtgcttggctcccacgttcaggttcctcccagagctgtactggccctgttgaggagaagaggggccccagcagggagaagagaggtcccagggctcagaggactgtcccctcaactgtggctggttgctctgtaagttcaggcctattccagaaatcctgggggcagagcctcgtcccccgtctcatgtctgagtctaagggaagtgtctcaactgtcttcccctctctgtgggcctcagtgccccgcttctgtaaaatggggggtgggggcttatgcttaacccctaaggaggctccaggtataagagcttgtggggaggaagcaggccatggttgagagctcaggctgcctgggttcaaaccctatgtcttcctttacctgcttgatgacgcctgggcaaatgacttaacttctctgggcctctgtttccttgcatctaaaatggggaatgtcttgaggcttaaatatggtcctgtttgtaaagcgcatagaacagggccaggatatggcatgtgggtcgacccgtggagtacaggctcctcccatttcctcttgttcccttcacttcctcccttcatttagtcattcacgcattcacttcttttgcctgcttcttttgctgcagccagttttcttacacaagttcgtaaaatcctcacggccacccagtgaggcagagctcagaaagaggaggctatttgcctgcagcctcgagttagagatctgcagagccgggtggcaggccctgagactccaggatcccctccctgtgccactggagtaacagctgccccatcaggagcgcgggccaggcagcctctggaccacagccaggaggcctgaaggagtcctcaaaggcgctggcattccagggagggtcggtcagatctgggctgcccagttctgcccttgtttgtttttgggaagtcccgggccctgccctcctggggcttacagctctggagggacacactcattactcaacagtgacgatgagagtggacagggctggcacaggagatcccaggggctggggcagcccagtcgggggcctgacccagcctgggagtaaaggagggcttcccggaggaggggacatgtgagcatttgaaagattgccaggagttggcgtggcaaagaggaatgttgttagattgttgctggccacatccccaggacccggcttctcccttctgtaatgtcagtcctcatctctctctgcatccctccttcctttccctctggagccactcatggagcctgggactctcttcttccatctcttcaaccaactgactcccatcctccaggtctcagccccagtgtcccctccgagctgccccaaccctaaacactgggcaccactgtctagggatggatctgtctcctccactggatggtaagccctgggagggcagggctgtgtgtaagaaggactctcggagtgctgttgagaacattaaaatgggagtgagggtggggactctgtgcagggctgctggtagaaggactctaggaaaccctagtccacagggggttcctcagtagcccagggatacccaggtagtaagaggcagagctagggactgggcccaggccacctactcctgcctctgtgcttacccctgtgccacgctcctgcccagaggtcaccatggcatggggcgtgagagtgggagccttttggtcttggcctggctcagaaggcccacttctcggccaggcgctgtggctcacgcctgtaatcccagcactttgggaggccaaggcaggaggatcacgaggtcaggagatcgagaccatcctggctaacacggtgaaaccccgtctctactaaaaatacaaaaaattagccgggtatagtggcgggcgcctatagtcccagctgctcggggggctaaggctggagaatggtgtgaacctgggaggcggagcttgcagtgagcggagatcgcaccgctgcactccagcctgggcgacagagcgagactccatctcaaaaaaaaaaaaaaaaagaaggcccacttgtcacctgctgtgtgaccttgagcaccggcctttcttccctgagcttcagtccccagatttggagacgggggttaatgtagtttccctgggcttgtgagagttcagtgaagggggacctgtgtactaaagccctgcatggctctggtacatcacggcccccagtggggacaagcctctaaggctgtttaagccttggctctcctgcctgtcaaatgggcacgagggagggatcaagcctggctctgcaggtgcagacagggcatttgaccttgagcaagacctccatggcttgtctgtaaaatgagcaccagatggtccttactcccgtggagacatgaggattccacaggtcacgaggtaaagtgcagggtacagctatagctcatctcaaataaaatccgacctctcctccttggccagatgtcacatcctgtcactccacacttagaacatcagtgtccagacctcactgtggctgcccggggcccagggatctgtcccaccagcctccctgcctcatctctcctccccctgcccactccacccagctgcctcagctctcactggccctcagacaaggctcaaccacctctgggcctctgcacctgctcttcttgctatcggagtgctcttccctcagtctgctgctagtgcccagcttggggctggaggggtgggtgggcgggtgtgtggagtcctggagactgtggccgagaggacaagccctgagctaggttggttgggacaggcaggaggggcaggctgaagagatgtctctgggctcagggtagccctcagcttccccatctgtgaacagggagactgggcgtcacccagcccagggcctgtcctcgcagggttggagcactgcctcatgcctcttcttctgtctccgcagccaaggactacgagaacgccatcaagttctacagccaggccatcgagctgaaccccagcaatgccatctactatggcaaccgcagcctggcctacctgcgcactgagtgctatggctacgcgctgggagacgccacgcgggccattgagctggacaagaagtacatcaagggttattaccgccgggctgccagcaacatggcactgggcaagttccgggccgcgctgcgagactacgagacggtgagctggggagtgggccaggcctggcacctgagccaggcagatactgagggctgggctggcggggacgggtgtgaggagccattcactcctctacttaccactcagccagccagcaagtgcctgtggggccttgggcccaggccagagtacccaggccacagctctgctcagccatctcacattttgtgaccctgagccagttaccccgcctcgccacaccttcctttccatatccgtgaaatgaggagaacaagaggatcagcctcaagggtagcggtgaggaaaagtgagcttttgcctttcacacgagtagaccagtacttggcccggggtcagtgtcctgtgatggttcacctgatggttactgtcattgttagtgctggtgctggacaggagccacacagcctctcttcttctggtggagcttgtctttcaggggcaggcagaaaacccaccactgaataggttagcagaataattgcaggtgaggatctgcactttgaagaaaagaggaagggcagtcgggcacagtggctcacggcagtaatcccagcactttgggaggccagggtgagaggattgcttgagcccaggagtttaagacaagcctgggccacatagggaggagacctcatctctacaaaaaatacaaaaattagccaagcgtggtggcacgcacctttagtcccagctactcaggaggctgaggcaagaggattacttgagctcaggagctcaaggccgcagtgagctatgctctcaccactccactccagcctgggcgacacagtgagaccctgtctcaaaaaaaaaaacaagaagggtgatatgctgccagggacagcagacaggatatgtgtgatatgctgatgagggaggggacctagggcacagtgagaattcgctagtgccctcacccacctaatgaaaatcctgacggtatgaggctctgcagagcgagcacacaccttcacaccaggtgtgctctgcatcttccttcagggaggctggctgaatcattacagcaccctgggacgtgggaactgggattactccccttgcacagatgaggaaacagtccctaaggggtgaagtcacctgcccagtgacccccacctggttagtagcagagctgggatttgaacccaggaggcctggcctcagggccttatctctcccacctcagagttcgctccctgagacggggccgtgcgcttgtcctgcgcatggggatggtgcagcagggggcttggtcagtgtgtgtcgagaggattgttatcctgccccccgacacagacacacttcactccctccttcccttgcaaccatcacactcggagctgcttgtgtcgtgtagggaggggcaaccagggagctgggagccgcgagtctgcagttggtcgcggggctgagaagcacgagtctgcagtcggtggagccagctcagacactgtcctggctgttggccgctggcctggggtggagggtggacttcaggccaggtgaaggcttgagctaagcatgagtccaggggacacatgttaggatgggggcagagatgtggcggggggttagggcgacacctagaagggtgggggcaggggcagcagagcagaggccttcccagcttgggctcccaagccattcttggccaagcccctccctcattgtctcttcctgtcctaatctagaaaatggtgacaagaggagtggccgcctccggatggctgtggctgtgatgacatggttgagtaaaggtcacgagctgcagggctcagtaatgagtaaccaaggacagtcggtgttgggttggggcagggctccaggtgggaagggggcctggggagacagtggggcagaagagaggagccccaaggacaggtttagggcagggtcttcatctcgtgtggggctgcaggagcatctttccccagggtaaggagcaggggctgcaggcagggtcttcgtcaagtgtggggctgcaagagtgtctttccccagggtaaggagcaggcttttcaagactctggcccagtctagggcccaaccccgcatactcccaaccccgcatactccctgaggctgggctggttggcttcagccatcttgtgggtgtgccacgtctgagctgtgtcccaggcctggcggatggcagggagggttgagggggtggggaattcagagtcttttacagaatacccagcacctaaattgtcatggcccatttccccatgggggctctcccagcagcattggggacccccacatgaacatgagggcttacctgtcatcaggccatccatatgcctgcaggccttcagccttgctcctttctgcgcagttcttcaggctccatgtgccctggggcagttcatcttcccaagactctacctcctgcttgctggatgctagagtttcctcctagaccagaagctcgccagggaagcagagcaaagacgtgaccttggccttgggcgggggagctccccttagcctcggtttcctcagcggtctgctcactctgggcccagcactgctgggagccctttgtgcacctgaattcagcctgaattcagactgaggcctagagaggagatgtccctcctccaaggtcacccagcagggaagtggcagagctgagacttgaacccctagtccatgcttgtaactgtttctgggccacaatcagttgaatagcttcagcacttttgtcttcatcaaacagagaattaaaaacggttcattgtttggaggaagtgtgtataaatattgttttgtggaaatgacttttcatttacacaagtacagatgagtgatggatgtgatataaaaatccctattttacatgtgggctgcaggcagagagtctgcggtcaccagtgcaggggctagatggggcaggctctgggctcaggacgcctaggttcacagccagctcagattgggtagcagctgcatggctcctagtgccttttttctcagccttagtgtcctcatctgttaaaggaggtgagaatataggaataacaaccaaagtgttttttctttgtttttgttttttgttttttgtttgagagagagtcttgctctgtcacccaggctggagtgcagtggcacaaatcttggctcactgcaacctctgcctcttgggttcaagcgatcctcccacctcagcctcccaagtagctgggactacaggcgtgtgccatcaagcccgggtaatttgtgtaatttttgtggagatggggtttcaccatgttgcccaggctggtctcaaactcctaggcttaaggaatttgcccaccttagcctcccaaagggctgggcttacaagcatgagccatggcacccggccccaaagtgttttttctattctctcagtcaacagttacacagaaaatttctgtgaccactggtcacgaaagggagtggaggtctctccctaccggcaaccaagcagtcgattctgcagtggacaccagctgggtgttctcttattgaattaattctgacactatctgtccagagatagcattagattccacaggttgaggacttagtccccacttgtcccttatttctgatgctgatcacaagacctaggttattttgccggtgattctgactgactggctattaattagggtttctgtgacccactccttgggttcaattaatttgctagagaactccctcatggaattcagagaaacacatttaccagcttattataaaggctgctacaaaggatacagatgagatgcgcagagcaacgtgtgggatggagtgcagagcttccgcgccctctcctggagcaccactcttcaggaacctccatgtgttcagctattcagaagctccctggacccagtcctttcgggtttttatggaagcttcattatgtagacatgattaattataccattggtcattggtgatcaacttaaccttcagcccttctcccctcccggaggttggagggtggggctgaaacattccaaccttacaggcccactttggtcattccagtgaccagcccccatcctgaagctacataggggtggctagccattagtcaacacatgagcatgcaaaaagacacatcactttggagattccaaagattttaggagttatgtgccagaaaacagtacatgatgaatatcaaacctgtatttcatagtaccactggccacccgtggtcttcaaacacagttccctcatatccaaagaatatacaactcaaaaggtattactggccagtttgttactagaactccattaggtcattaataattagttcatcatattatatgattatgtctcccagggtgagaccagtcaggtttgcaggtttctattcagtcttgccaatttccaaaagcaggcgtgatctcagcaaatatatggctcccccctttcaggcattaggtataattgagataagagacaatgtcacccttgttctgagcctctttcaaagtgttaatgtaatactggagatttcttaattcataactcatttattcattcgtttaccctcgtaaatgttcctccgtttcttcatttatacctgttgtcctaaaggaagaaactgaggcaaaattaatataagtagagattttatttgggccaaggttgaggaccagcctgggagcctcaggttatctcgggaagtgctccagagaacagataagctcaagcgtttaaagacaaaaggataaatcggggaggagtgattacaaagggtgtctttcaggaattctcattggtttaaaaaataacattgatcagtaattggctctgcgttattaaattacagggtgtaagtgatggcatccgtgtatggcattgtgaggttgatgtgtagctgtctctggactcttactcttgagtccacagggtcagtggcttcgggggatgagtttttctcaagatggggagtgggacatgactgctccctcattccagttcctctctaggctcaatcatttaaagggggtttgcattactcaaggaaaagtttcttttctttctcatttttcccttttggtcaaaatctttctttttaaaagcattgatcagagtctgagtgtcagggtgtccctcgtcactaggaaggctcactttaggacaggcctgttctatgttggggagggggaaggagatggctcagtgaggaattttcagtgtgtccaaaagctgaagtaggatggcctcacagagtggcaaaaagaagacctgaatcaagtcactgatttatacagctgcgtctctgtgtccaatcatctctagtcttcagaataccatgattttcattttctcggaagtaaaacaagaagattagtaatttaaatagtagaaatataatgcacataaggattataatgaaaacaagaatgtatatgccagaatgaaaaaaagagccttttccaattagggagccagctaaaaacatgaggaaaatgaaacccagcttctgctttggggacttactgtagccaagatagaattcaagattcagtacaaactgtaggcaagtaataaaaacccaaaaacagtggtcagggctagaatctaaacacagatgtgcaactgaagcatcatttttcctttccagtcccccagttttaccaaagacactaataatagcaagaccaatttattctcaaaataagttttagtgttatactttatttgcataaagtacagcaagattagtgactgaccatatagactccttttaagttggctttcccggaaaatgaggaatttcggattagactttttttttttttttttttgaggcggagttttcctcttgttgcccaggcaggagtgcaatggcgcaaactcggctcactgcaacttctgcctcctgggttcaagtgattctcctgcttcagcctcctgagtagctgggattacaggcacctgccacacacctggctaatttttgtatttttactagagacggggtttcaccacgttggccaggctggtcttgaactcctgacctcaggtgatccacctgcctcggcctcacagagtgctgggattacaggcctgagccactgcacccggcctgtaagatactttttgagaagaattaaagtaaaacaataattgcctgtgtatgacagaggacttagaacagccatggttaaagactcaattgaccaggaaatttggctatttctgcagcatataatttaacataataatcataattaataactgataacatatacgaggacatagtttcttttttagaaatctgtacaattttggaacatatattaatgagacccatacaaatataacaaaaaagatcagcaccatttcctacgtgacaatacttcccatatggtttttaacatcccagataagcctaatatgtctctcttggtcttccggggtccctgacatccagaagttagttcgaggtcaaaaagacttaattttagaatttgaaattagatttttctttgaaattagatttttctttttttttttttcttttttggagacaaagtctcactgtgttgcccaggctggagtgcattggcacaatcttggctcactgcaaccacggcctcctgggctcaattgattcttgtgcctcagcctcccaagtagctgggattacaggcatgtgccaccacaccccgctaatttttttgtattttttgtagagacagggttttgctatgttggccaaggtggtcttgaactagcctcaagtgatcagcttcagcctcccaaagtgccaggattacatgtgttagccaccacgcccagccctgaaatttggttttgtaaaccctacaaatgcatcaaaggtttgaaacacttaatcaaaataggatcacacatcactgtgaaataatatagtcattcatttagccaaagtgttaattagaagatttcaaaaagcaaaaacctttactctttggtagagaggagactcagtttcccaaataatcaaaagacctaataaagacagcataagagcaacagaatctttctctccctctccccttttttgttttttctgtgttgtttgtttgtttgttttttgggatttttgttttgttttgtgttttgcaatttacccaaaagataagtgaaagaaaattttttttttttttttttgagacggagtctcactctgtcgcccaggctggagtgcagtggtgcaatctccactcgctgcaagctccacctcccggattcaccccattctcctgcctcagcctcctgagtagctgtgactacaggtgcctgctaccacgcccagcgtattttttgtatttttatgagagacggggtttcactgtgttagccaggatggtctcaatctcttgacctcatgatccgcccgcctcggcctcccaaagtgctgggattacaggcgtgagccactgcgcctggctgaaaaatcttttattatcttttactaatactacaccagccgggcatggtggctcactcctgtaatcccagcactttgggagactgaggcaggcggatcatgaggtcaagagatcgagaccatcctgaccaacacggtgaaaccctgtctctactaaaaattaaaaaaaaaaaaaaaaaaaaaaaaaattagccgggcttggtggcatgtgcctgtagtcccacctactcgggaggctgagacaggaaaatcacttgaatccgggaggtggaggctgcagtgaggcaagatcgtgccattgcactctagcctggcgacagagccagactccgtctcaaaaaaaaaaaaaaatactataccaaaattttgctcaaaagagaaaaacaaattcttcctttgcatcaatgtattatttatggtaaagctaattttaataaaaccttataaacaaatctatccaatctcaatcagctttgaccatacaaaataagatttccatgaatcttttgtaatttacaaatttttccattcttttttctccctactttccatatctattcagtttatctcattttttctttcttttattccttcaatttaatacaacctttacctctaaactaagtaaaattgcttttcctttaacaaaaccacatcctctgtcttgtgtataaccttccttaccaaaaccacatcttagacgttctgtatacagaattgtttctcttggttatcacatattagaattttaactcttagtgaccgtaattcatagcaaaaacctaagaagcaagcaatttttaactgttagtcatgtagcagtaatttatgatgccatctttataatttttagaaatatagggtttctaatggaacaatttttcaatggaacaggacatttttcctaacagatctcagtatcttttgtttctctaaaataagaagtcagaagccatatttagtagttactgtcttagcatcatctcttatttggaaatgatctagatattcaatgaatatttgtcattaatttagcttagtaaaaccctaagggcataattaccaaaagatttgagaaacctttttaagtaggcatattataaaacataattattattaaaagttcatttataaagttgattctatttatatgtatttaatttattcatttttagtgattgttgggaaaatttcgtgagacagacaaatccaaccatcatctcaagttaaattttctattaaccattttttattattgtacgttaggcaagtatcatagaagtaagaaccttaaagttagatacatacatattttgctggtaactcagaaaacatagtttttatttatttatttttattttttatttttattttttttgagatggggtctcactctgtcgcccaggctggagtgcagtggcgcgatctcggctcactgcaagctccgccgcccaggttcatgccattcccctgcctcagcctcccgagtacctgggactacaggcgcccgccaccacacccggctaattttttgtatttttagtagagatggggtttcaccgtgttagccaggatggtctcgatctcctgacctcgtgatccgcctgccttggcctcccaaagtgctgggattacaggcatgagccactgccccgggccgccgacatagtttttattaaaaccatcccggctaaaacggtgaaaccccgtctctactaaaaatacaaacaattagctgggcatggtggcgggcgcctgtagtcccagctacttgggaggctgaggcaggagaatggcgtgaacccgggaggcggagcttgcagtgagccgagatcccgccactgcactccagcctgggcgacagagcgagactccatctcaaaaaaaaaaaaaaaaaaaaaaaaaaaaaaaaaaaaaaaacaattttaaactagttttatttgccaaaagatttactgatttactcaggtcatgtgaacttggaaaatctttgggcttactttctttatttttttctttttcagacggagtctcactctgtcgccaggctggagagcagtggcgcgatctcggctcactgcaatctctgcctcccagtttcaagcgattctcctgcctcagcctccaagtagctgggattgcaggcacgcaccaccacatccacctaattttttcatacttttagtagagatggggtttcaccatgttggccagatggtctcgatctcctgaccttgtgatctgcccccgctcagcctcccaaagtgctgggattacaggcatgagccactgcacctggcctcggtttaccttctaatttgtgagtgctcgtttgtctttaattttgtatcatgtagataatatacaaaaacatgtatagacataacatatatgtagacacaacatatagcacacatgtacacatgtatgtatcgacaagttacagagatcaaggagctctatgtaaaagagaatagagctttagacctgagaggagcctgtttacccacaatgcttggggctccatgaggataaacagaggttcactcatgtgataccaaaggtggcaagaggaaggagggacagacagcggtacatcaaagaacaggacttagaggagccagtcaaggagatcttgttttccataaagcaattaagttttacattatccttggcaaaaatcatgtcaacaagaagaaagagggattgtgtataattaggagcagtttgagaagagaggaaatcagagagaacagaggcatcaaaaaatatatatatacgtgtgtgtgtgtatgtgtgtgcatacatatgtagccaaatatcagcttttaatcaagtcagcttttgactatagagctctttaaaaacttttaatcaggttttagccaggcagatagtaaacattcggccagatgcagtggctcacccctgtaatcccagtattttgggagaccgaggcaggaagatcacttgaggccagaatcctgggcaacatggcaagacctcttctctagtctcaaaaaaatgtttttaaacagatagcaaacctatctgttccttggctttccctttctgaaattcacatcaaggagtttgctttgggaggtgggtcatatttgtttattagaggtctagggtaatcattatttaaagctatttgtcttttgtaaatcttgcagcaaagttcagcagacagttggagcatttaaagggttttctgggggagtttcctaaaaaaaaaataattgtacctttcaaatctcttatgagattgcagccaggacaaataggaagtaggtctccattcgatttgtctggttctaaatcctgccttttccaattgtgtgcacaaatacattaatttaggaatttcaagaccctcatttgggccattgcactttggggtatctcacgccgctgggtccatttacctaggtatttgcaggatggcgctccataggtattagacataaatccagctggtgtttcggggccggggcgggggggctgtcctttaaggcaaagctcagtttcaatgagcagtttcctataattttatttatttatttatttgagatggagtcttgctctgtcacccagcctggggtgcagtggcgcaatctcagctccctgcaacctccgcctcctgggttcaagcaactctcttgcctcggtctcccaagtagctgggattacaggcatgagccaccacgcccagctactttttgtgtttttagtggaaacggggtttcatgatgttggccaggcaggttttgaactcctgacctcaagtaatctgcccacctcggcctcccaaagtgctgggattacaagcgtgagccaccatgcccagctaatgtttgtgtttttagtagaggcggggtttcacgatgttggctaggctggtttcaaatgcctgacctcaagtgatccacctgtctcagcctcccaaagtgctgggattacaggcgtgagccacacacccagcctcctataattttagaatttccttctcaaaagtgaccaaggccaggacagtatattgcgtcgaggtgtgccgctttgtgggtgtcactcttccaggtgtcaccagtgaatcgtgaggcatgttcttatgtgtcttggaatctcttatcaccttgtggcagcagagtgcttcaggtatcagagtgaccagtcccttattcatacctttccagctgagcaagagtccttactggtcttcttcctaatgggaggccctttaagactccaacacgtcatgcatggaaaaacatccccatacctctgcaaagtctctggttgcctaaagaatccagtgggtcaaagggggcaattttctcttctctttgaggcaagatgacttaccctcatgcagcttagtcagaagcagctgcaatttaaaaagcatgctgtctaatttcagcccagaagtgcagccaccagtgccagaatgccagtactgtgacccgggcctcctgctgtgaagcagcggtggagaaggcagttttctttttttccccctgaaactcgaatcccttgctcatagacaaagatggaaaccttcattctagaaaaagagagatagaaccactcaaataaagtctagacctcatctgacaagagagggggtccagattcaggagcactcacccttttgcccccagtgaacctgtggaattggaggaacacagtgggtttgttctggtactgagcatcgagtccaggggcacccagtgtctgagtgggtagctctgaaccctgctcacagggccaaaaaacattgacataaccgaagaaactgaggcaaaattaacatagacagagtttatttgggccagggttgagagaattgcagccctggaaacactttaagttaccttgggaagagcactggagaacaagggagaggcttgtggtttttgttttttttttagagacagaattttactctgtcacccaggctagagtgcagtggcaccatcattgctcactgcagcctcaaactcctgggctcaagtgatcctcccacctcagcctcccaagtagctgggactgcaagtgcatgccaccgtgcctggctaatttttttctttatcgtagagatggggtcttgctgtgttccccaggctgatctcgaactcctggacttctgcctcagcctcccgaagtgccaggattacaggtgtgaggcaccatgcatggcctgcttgagcttttaaagaaaaaaaggacaaatgagaagaggggtgattataaaaggggttttgcaggaaatatcattggtttacagaaataacattgattaataattgcccatccattgtggaactagagggtgtgagttacggtgtctgtggttggtggcagtctagagtccacgtagcacgtggcttcaggcgatgagtacttctcttaagtgagaagtgggatatgactgctgtcctattccagtgcctctctgggcctgatcatttaaaggggctcaccatataacttttctttctcatacccacccttttcgaagggacattggaattggccactgtgctggatctaggtcgtaggcagcaaagtaatctagcacatgcctcctcttagatcacttccattcagatagggtgtggttacataggtgcgggactagtgggctatttttatcagcaggctatataactgcattcactgttagccccagtttcaccagatggtgtgaaagcacaacccactcccatccggcccttgggaattctgacagaaggtttaaaaacatagttacggtttcttaggaattatccctgcttccagcacttggtgctggtagatagagccttggtgctaggaccattacatcaggtaggagaaagaaagagagaaataaaatttataatcactgtaccagcgtatttctcccttggctagaactgcagagtcacaccaacatcttccccagattctgcatgtaatgttgctgcttggggagtttgagaagatgctgacagtttgaagcagggatcagaaggtggcccaccaggagtgagctggagatgcccggtctctcttggtttaacatagaggacggggaatcaaaggcttagggaaattgtaatgcttgagtggatttgtaacttaaaacccactcacccacactggagggtccagagaacacacctttcaccaatactttgagaagcagatttatgagggggccccggcatccctggttgctcctctctgcaagctggaccttacggtgggaaccgcagtcactcagttggaaaacttacatgcagtgggaacaattagatcctggagaggcagggaccaagtgtcagcactcagctgctgaaggcaagatgtctgtcatggacacagaagcaaatccacaattagaataatctgactgttgcgccccagtcagaataagggcttatgggggcctggtgatgaatggagttttagctcaggtccgactctcagtgggttgagttggtccctggacccctcctgtggtcatttcccccgttccagctgcacaattggaataaatgtactcagcagctggcggaaaatccccacgttggttccctaagctgtggagtaagggccattatggtgggaaaggctaaatggaagccatagagctgcctctacctaggaaaattgtaaatcaaaacagcagcacatccctggagagattgtagagattagtgccaccatcagagacttgaaagctgcaggggtggagagccttaccacacccccacttcactctcctgtttggcctatgcagaagacggctgcatcctggagaatggcaggggattatcgtaagcttcaccaggtggtgaccccagttgcagctgctgtaccatgcggtttcattgcttgagcaggtgaacgcatctcctggacctgccatgcagctactcgtggcgagtgtcctttctccatccctgtccgtaagacccaccagaagcagtttgctttcagttggcaaggccagtgccacacccttgctgcctgcctcagggacatatcagtccttcagccctgggttacagtttccttcacagggatcttttctttttaaaaaattaatgaaatttttattaatttgttacctttttattttaatagctttgggggtacccgtggttttagtggcatggatgaactgtataacagggatgaactgtatagtggcagagtctgagatcttagtgtacccgtcacccgagtactgtacagtgcacccagtacatagattttacccctcacccctcccactctcccccttctaggtctccagtttccattataccactctgtatgccttgcatacccatagcttagcttccacttacaagtgagaacatagagtgttttattttccattagtgagttatttcacttagaataatggcctccaactccatccaagtctacaaaagacattattttgctcttgtttacgggtaaagtagtattccttcatggggatcttgatcacccttcccttctgcaagctatcacactggtccacgacactgatggcattttactaattggacctagtgagcatgaagcagctactctgtacttattggtaagacagtgtggagtgaggcaattctcctaataaacaccctctcatatatatccacatgcataggtatagtcatgcattgcttaacaaggggtagtttttgagaagtgtgttgttaggtgatttcattgtgtgagcatcatagagtgtgcttacacaaacctcgatgttacagcttactgcatacacacctaggttatgtggcatggccgagtgctcctaggctacacgcctgtacagcatgttactttagtgaatgctgtggcaactgtagcaaaacagtaagtatttatgcatctgaacgtagaaaagggatggtaaagtcatggcttacacctgtaatcccagcactttgggaggccgaggcgggtggatcacgaggtcaggagatcaagaccatcctggccaacacggtgaaacaccgtctctactaaatatacaaaaaattagccgggcgtggtggcaggtgcctgtagtcctagccactctgggggctgaggcaggagaatggcgtgaacccgggaggcagagcttgcagtgagcggacattgcgccactgcaccccagcctgggtgacagggcgagactctgtctcaaaaaaaaaaaaaaggccaggcatggtggctcacgcctgtaatcccagcactttaggagtctgaggcgggcagatcacgaggtcaggagttcaggaccagcctggccaagatggtgaaaccccatctctactaaaaatacaaaaattagccaggcgtggtggcatgctcctgtaatcccagctactcgggaggctgaggcaggagaattgcttgaacccgggaggcggaggttacagtgagccgagatcaagccattgcactccagcctgggcagcagagcgagactccgtctggaaaaaaaaaaaaaaaaagataaaatctagtacacctgtttagggcacttaccatgaatagagcttgcaggactggaagtttcactgggtgagtcagtgcgtgagtggtgagtgaatgtaaggctaggacagtaatgtgtatgtctgtaggcttcataaacactgtacactagattatattaaatttatttttaaaagtttttggttcttcaataataaattaaccttagcttactgtaacttactttataaactttttaattttttaaaactttctcactttgttgtaataacacttagcttaaaacacacatatacacctgtacaaaaatattttctttatatccttattctgtaagcttttttctgttgaaaaaatatttcttttgctttttaaacttttttgttaaaaacgaagacacaaacgcagacattagcctaggcctacgcagggtcaggagatcagtatcactgtctcccacctccacaccgtgtcccactggaaggtcctctggggctgtcacacgcatggagctgtcatctagggtgacagtgccttctggatacccctgaaggacctgcgtgaggcccttgagaaggtgtggttcttttcagaaaaatgtccatggtggttcgcttggcttcttttttcgtcatggatttgtgtgagtaatggcgttgtgctgagacattcccatggctgtgctgtcaccaggcaataggactatttcagtgtgtttatcttctgggaccacacttgtatatgtgggccactgctgactaaacatcattatacagctcatgactgtgtgtatgtctctctcttttttttttgagatgggtcttgctctgtcgcccatgctggagtgcagtggcgggatctcggctcactgcaagctccgcctcccgggttcataccattctcctgcttcagcctctctagtacctgggactacaggtgcccgccactgcgtccagctaattttttatatttttagtagagatggggtttcactatgttagccaggatggtcttgatctcctgacctcatgatccgcccacctcggcctcccaaagtgctgggattacaggcgtgagccaccacgtccagcctgtgtgtgtgtgtctctctcattagttctgtctctctggagaaccctgactctcatgatggatgtccctcacggggtccttttccggaagacaccacctatgttctttcctgtctatgcttggaacttgggtgcaaacctaggccggatctgggggactccctctgtgctccctggcccttcctgggatctcctgatttttgttctgtggctttgggttccttacatcagagtccagcacagtcagttagaaatgcgtgttgccttgcaagcggatactagtgcctgtacacctacagcatggatctgtgaaagtaacaggaatagtcacaaccactatttcatccagcgctcgccagggcccagggtgtgaccttcatgcagtaatataactcatttcatcttcacggctaccctgcgcagtggagactctctttgtccctggtttataggtgaggaaaccaaggcccagagggtagctcactccactgaggttgcacagccaggaggtggcagctttgtcccagagtcaggccataagcagggcaggcgcagcgggtccgagtttctcggcacagcactcacccttagctcaggcagtgcaccttggtggtctctctgacttattatacagagaatgctgggtatgacttgccaaactcattcaccagaaactaacccactagggtaaaaacccttatgtcaggcttcaggctgtcactagcagcggcatttcctgccctggaaacctgacttcccccagctgcctgcatgcctcaggcaggcacggctcccttctgggctgctgctcattgtctgcatgttggagatattcagaatgccctgttacaccttgtactgtgggtccactccatgtgggatcttgatgctgctctataatccctcacccttagttttaaaacccaagcagttctgaagaacagttgttctggtaagtttgggcagctcgttcagtggcaaaacctgacctgaactactaagaagctgctgatggtcttgattactctccagtggcatgtctggaggttttgctgcagaaatggccgtgtatgtgcttgtgattactaggtactgccttggacctgctgggggtgtcctatgatagagcatgtacacaaaatcatgtgggtttttttgtattgttttgttttggtttttttttgagacagaatctcactgtgttacccaggctggagtgtgatggcacaatcatgactcactgcagccttacctgggctcaagcaatcctcccacctcagccccccaaagtagctgggactacaggcatgcaccaccatacctggctagctttttgttgttgttgttatttttttctagagatagggactcactatgttgtccaggctggtcttgaactcctgagctcaagtgatcctcccacctcagcctcccacagtggtgggattataggtgtgagccaccacacccggccatctaccaaatcaccttactaaaatccaaaaaattcccaatccccaaatacacgcagcccccagggcttcttcggggattgtgaacctgtgttaccatttcaccagctccagacatcattacccatgagtactcgctgacgaagataatgcttttagaaacaacttgtttacttagcactgtggattcacctgcagttgtaagaagtaatgcagaaatcccagttttccctaaaggtatatctggcataactacataaatatcacagtcagaatactgaccttgatacaatccaactgccactttaaaaaaaaagttcagtgtgaagttctgacccggtgggccttcaggagctgagtcccttctggtctggactgaatgaccttcctcaggagcaggagcccagcagggcatcttcactgtcccagctagaccttgcgtgtcgcagcagctacagtagcagcaggccttgggatgagcacttgcctgctgctgcctggcattaagttctcacgacaatcctccagggggtgctggcaccacccctactttctagaaactgagggaggcttgagatgtgaggccgcctgtcctggcaggcctggattcagacccaggaggcctagtcccagagcccaggctcataaccactgccccacgctgcctccctggagggcatgcagtgtgccccagggacgagaggcccaggcagggaggggaggtggtggaaggggagcccatcccagcgtgcatagcggaaatcaggagcctgggctttggcgcagtttcgcctgggagagaagggaatcctggcttcctgggtgggtgacttcacctccccgggccttggttttcttgtctgtcagatgaggattgtgaaaacactgccatgtagaggtgcatggaggataaatgagcaagtgaattgcttacacaatattaggcacatagtaagtgctctagaagtgagctgtgtattattattgttgccgctgccactgttggtattcccactccctttctcctccctgcgctgtcattgtttgccttcatctgccttcccagcccgcccacccctggagaacaggagactggcggggaggaaatgctcagtcactcattcatttctttggagaaaggggggaagggaaattcattgactgctgcacgcacagctatggctgagcctcagccctgccctcacagggccaccttccagcggggtggacagaccggttccgaaccagcagggctcacggctggaacaagggagcccaggggcctttgggagcccagagggggtgcctgacccagcctctggggcttcctagaggagggatcagtggggctgagacctggaggaggagctggaggtgcaaatgaggtgctctgggcagaggcagcctgcataaaggcctggagccagcatgccggggacatgagtggtctggctgggaggtatagaggggtgggaggagccgcatgggccaggccacatgctggtttggatgccagccgggtgtgggcacataaccactcctcattgggaaggatgccaggggctgcctggcactgtcttcctcccctgccttacacccacccacagcccaggtggagctgcctggcagggtgccctaggcctgcccagacagggaggaggccgtggcctgctgggcctgggctcttctcaccccgcttggcgcacacacctgtttccagcatggatgagcctcaccccctgcttctgtcacaccaacctgcaggggtcagtgggtgtctctgtggaggtttctgagtcacgctgccaggctttccaccagaggccacccctgctccttgagggccggccctgggacctcccagtctgtcctctggcacaggagatacgggggtctgctcctggggaggctaaggatggtgggcaggtcagacgggggtctacgtgactaaacaggtgaagtcacttgcccaaagtcacatggcaagtaagtagcagagccaggatctgaatccagcccccaaatccagtctgcttttcaggttagaagatcagagtttgcaggaatcggggtaaataaggttgcggggatagggctcctttcactgggaacttgctatgtcccaaagctgaacgccccatgcctattgtgtatgatctggtcatcagcgcagcagccccagaagggggaccgtgaagagcagtgggcgcccacgtggagtttcctttcacctggcaccactgtgcagggttcacaagcattcacccatgcagctctcccagtggccctcttgagggagatatatatggttctcagtcccacctcagagagaaactgagccacagagaggcagactcacctgcctgaggtcacccagctcatgacttgcagagctgggatttgaacccggtctcagggatctgtgaccctcagttcctctcttcagtggacaaaacagggaaatcttttgtcctgggcctccccagagtgtgagggagggaagtaacagcactcggtgctgctgcccacctgcccctgctgcatgccgggccccctgtgttacttattccttcccacagccctggcaggggagccctgtgtcacctccctgttagagattaggtaacctgggcttggggagtccatgtcgtccagcaagtcattggccctttgtgtgagtctgggctgttctgtgaccgtagacccagccgggcccttcctctcatgctccgccaccttggtagtcacgatagtagcatcaggacctgtgcttgggatgctgctcaccccacagggattctcacagggcacctgaagctgagcccgcagtcctcagacaggcagttgtttgattttagcgcgctcatagctaagattgatgaagtgcacccatgcgggcagctttgctgtgcccagttttggggtgcagaaaccaaggctcggcagttaaatacgtctagggttgcaccatcagcacctggcgcccaggcggtctgacttccactttcatggaacccagggctgggcagcctgggggcaaccgctgtgcccccacctcagcctcagtgtgcacgccccttccctcccacccaggtggtcaaggtgaagccccatgacaaggatgccaaaatgaaataccaggagtgcaacaagatcgtgaagcagaaggcctttgagcgggccatcgcgggcgacgagcacaagcgctccgtggtggactcgctggacatcgagagcatgagtgagtcaggcctggatgctccacgctccagcccagaacattccacacgggccttctccattccctgggggtggggttgggctcaggggtggccccttgttctgtccccaggctggtgtctgtcgctcctctgcctgtgttccagggcgctccatccacagcccaaagctgggcctcacgcttcccagtgagcgagattggagagccatggtccccctgccatttcacgggcccttcctccgggtagtagcacagtccccacaggctgtgtctgattcacctctaggtgctgagaagatccaagggattgttgtggatcatcccacagatgattattgagcatctcctatgtgcccggcactgtcctaggcactaggggtacagctatgaacaaaacccttcctgtccacatggagccgatattctaggagggagataagatgatgaataagtcatgaaatgaatagtgctaagtgccataaaactgaatagagtaaaggggggtgggtgaaggaagacagggaggtcaggaagaggcctctgggccagacctgacccaggaggggactcttcactcactctgtcccgctctcgacctgtgtgtccacacccaagttttccccatccctgggagcgagacccccttctccctcatagtggctgtggtcactgactctcgtgtcccgttgttcacaccctagccattgaggatgagtacagcggacccaagcttgaagacggcaaagtgacaatcagtttcatgaaggagctcatgcagtggtacaaggaccagaagaaactgcaccggaaatgtgcctaccaggtaatgcatctgtcaggtactgggcacccgggaaccctgggatggcatcacagcactgccagccgcgggcactgagcaaaacgacaggagaagggcggccatgacagccaacaccaaacaggagtcgtgtgccggacactgtgccgagggcttaccacatgatctcatctcgtcccacagcagtttggggaggtggcaggcagtgccatttgacagatgcagggacaaagggccagagaggtcaggtgactggcccagggtgaaaggtgaggaagcagtagagtctgttgctttgagttctcatcccaggctcttgggcgtctgtggctgctggttgttgcaggttgtttgggacctgctggttgctcctagtcctgagaccaccccctccccgacctaggagggcagctggccacagggtgttaactggttgagtgagactcaggctctggtatcccatctggacaaggccccctgccctgacctctcagggctacagggaccttaccatagttttggggaactgctgagatccaccacctcctgggttggttatgaggatgcgggacttcttgtgagtcaggttgacaggcaggtgactcttacaggagtgtgcaggcaatatgggaagccgccatttgataggtcctagagagccaagtggcctgggttcaaatctctaccttcccacatactagctgtgtgcctgtgggcagatggcttcacctctctgtgccttgatttcctcctctgtgcagtggagataatcatactgtctccaccaagggctgttgtaaggagtaactgcgtgtaatccacatcagtgcttcgaatagtgcctagcacatggttagtgctctgtatgggttagctgttgatcatgttgttaaaggtgagacaggaggaggaatgtccacattcctggttgtttttaattgaagtataattaatgcacaataaaatacacaaatctgaagtgtcctgttagatgagtttttagagttttatgtgcccactgcccaaacaagttacagaacatttccatcaaccagaaagctccctttgacccctttctagtcagccctcactcccatcccaggggcaaccactgatctgatttttcaccactgtaaattaattctgcctggttttgaatttcatttcaatgtcatatgggcttacagcgtttagtgtctcttctttcatgtggcacaatgtgtgtgggattcatacatggatgttgtgtatatcggtagctcaagtcctccattgtctgaacagcccatgacttgtttatgcagtcttcttttgagagacatttgggttatttctactttgtagcttttataagtataagctgctatgaacttcttggacaagtctttttgtgaacatgttttcattgttcatgttgaatttctctattgattgtcttttgtttcattgatttttcattcattattctctatgcatgcttgaggtttaatttgctttcttctggcttctgaagatggacattaatgctgttaattttacatcttttcttccacacaaagcatttaaaactaaatttccttccaggcagtaagttagctgcgtcccgtgaattttaatacgtcgtattttcattatcattgagttagaattgttttctaattttctttatggtttctgattttatccatagattattgagaagggtattgtttaactcccaaatatttggggacttctagatgttactgttactgatttctaatttggtcagacaacacactctggatgattccattggggctatttttagatctgtcttggcaaacatgcagtatgtactggaaaatagtgtgtattttgcagtcgttagtcatagggctctataaatgtcaattagttcaagatggttgagactgctgttaaaaatcttttatagcctattttttctaattgctcaatcatttattgagggggctgttaaaagctccgactatacttgtagatttgcctatttctccctataattctcagttttttgcttcctgtattttgaaatttttattaggcacacatttaggattgttatgctttcttgatgaattgactcattataatgaagtgacttcagtactttttggcttgaaatccctgttttctattaaaatagttaaaccagatttttacagttaatatttgcatgctataacttttctacccttttgtatttaacccattggtatctttatatttaaaatgtttttcttataaacagcatatacttgggtcttgcctttttatccagttggacaatctttacctttttttttttgaggtggaatttcgctcttgttgcccaggttggagtgcaatggtgtgatcttggctcactgcaacttctgcctcctggattcaagcaattctcctgcctcagcctccagagtagctaggattacaggcacacgccactatacccaactaatttttgtttcgttttgttttttgagacggagtctcattctgtcaccagggtagagtgcagtggcgcaatctcagctcactgcaacctctgtgtcccagattcaagtgattctcctgcctcagcctcccgagtagctgggactacaggtgtgcaccaccatgcccagctaacttctgtatttttagtagagatgggattgtaccatgttggccaggatggcctcgatctcttgacctcgtgatccacctgcctcagcctcccaaagtgctggaattacaggcatgagccaccatgcctggcctgatttttgtatttttaatagagacagtgtttcaccatgttggtcaagttggtctcaaactcctgacctcagataatccacccacctcggcctcctaaagtgctggaattacaggtgtcagccaccattcccagccaatctttaccttttaattggagtgtttagttcatttatgtttaactatcagcaatcatatgattgcatttcaatctactgtctagatgtctcttttctatatgtcccatttgtttttttcccccttgtttctccttctttgactttcttttgtgtgaatcaggaatcttttagcatttcatctgttttattgaattttttgttatacttttgaatgtgtgtggcgaggggtggagtgttacatggttgctctagagcagcccttctcagctgaggctctatagagagaattaagccctaactcccttaggcatccattatatccgcagtgaattaactcctctcctgtgaatctgtgtgctctccttgggagaactgagcagatatcactgaaaatattttttgtggggcttaatcatttcccggaaccctggatgaaaaaggctgctccaaagattacaatgtgtaactttaacttgtcctattctactttcaaataataatatgatacttaatggacaatataagaatcttatggcctggggcagtggctcatgcctgtaatcccagcagtttcggaggccgaggcaggtgaatcacttggggtcaggagttccagactagcctggtcaacatggcaaaaaccccatctctacaaccctgtctctactaaaaatacaaaaattagccaggcatggtggcacacacttctaatcccagctgctcgagaggctgaggcagaagaatcacttgaacccaggaggtggaggttgcagtgagccaaggtcgtgccactgcactccagcctgggcaacagagcgagactccatctcaaaagaaaaaaaaaaaaagaatcttacaatattgtgattgcttttattttctcccagcctttgtgctcttgtcatgcttatgcatctgctataaatacattgttgtcatttccttaaatagacactagtcttctaaagaaatacacgtatgaatacacagaaaatgtcttttatatttaccctttctcttactccttgtttcttcttccatatgtgagtttctatctggtatcatgccccttctgcctgagtacttttagcatttcttacagtgcacgtctgctgtagactaattctctcagctttggtctgcctgaaaatgtttttattttgtcttcatttttaggggtgtctttgctggatgtagagttctaggttgacattgtttctttcaaggctttaaatgtgtttttttcccattgccttttgacctccattgtttctgtgagaactcagcaatcattcatatctttgttctatatagtctgcttttttcttcactggttttaagatgttgcctttgggttttagtagtttgactatgatgggctttgatgtgctttttttgagtctgtgggttaatatctttcattagttttggaaagttcttagccattatttcttatatttcttcccatttctgctctcctctccgtctggaaagctaataacatgctctttgatactatttgatactattccttagatcttaatgacctgaatttttttaattcttttcacgatttttcctctatgtatttcagttcagataatttcagttgtccttatgttcactgattctttgtaactgctgtcaagcccaacaaatgaattatttatttcttacattgtattttttattggtagcattttcatttagttgtgttttttttaatagacttttcatctctgtgtctcatgtgttcatgcatgttgtccaccttttccaccaagtcctttcacacatttaccatggttatcttaacgtctctgtctgatagttccatcatctggttcatctctgagtctgctctgttaccagttcttcatgtgttttacaattttattgtatgccagctattttgtataaaagaacattagagactgaggtaaataaagtttttcctcagaaaatggcacacttaggctgggcaccatggctcaggcctgtaatcctagcactttgggaggccaaggtgggcagatcgcttgagcccagtagttcaagaccagcctgggcaacttgtagaaaccccacctctacaaaaaaaatacaaaaattagccaggcatggtggttggcacctgtagtcctagctacttgggaggctgagtggggaggatcacctgaacctgggaggttgaggctgcagtgaactgtgttcgagccactgcactccagcctgggtgacagagtgagaccctgtcttaaaacaaataaacaaataagaaaatggcacacatttctcctgttgagccacaagagggaggggctgtgtgaacctcatctgtagtttaggggcagcttttattggagtttctttaccaccggctttaaatgtgttcagagtagaattaggactttcccttcagcagagcttgggatcttagccctggcagaattccagggatgtctttatgttttaaagtcgccagcttttggaactgtgggaggcctctggtattcagccctgccgccagactgtggggccactggggtgctctccgctctccagtctcgcccccacttctgtacctcaggaggtttctctgcacctcactccctcgcgcccaaccttccatgaagcccgtgtgagggagttggcagggggcagaggcgggctgtgctggggctccctggagtcctcatctgtcacgccagtccccacacggtcatgaacttccactcatttcccctcacgcagggcatcccgccctgctgcctcgcaccagggtgaaagctgtgggctccttccccaaggaagggctcgtcctgtctgcattttgattaatttaggtccctttgcattgccagctctcagatggctttacctttgattttgttgcttgtttggcttgttttcatctttagggcgagacagtcttttgtaacttttctaccttctgactagaagtggatgccgcctgcattttcttaacacctttttccccagcttattttggaaatcgtcagacctacagagagctgaaagaacagtacagttaacatctgtccacccttcacacagattcaccacttgtgaacattttaatgcattaactttatgtgtctgtctacttatttatgcatttgtatgtgtatacttttttcttttttttcccctaacccatttgaaagtaagttgcagccatcataacctggatctcccaaaaacaaagacgtcctcttgtgtgaccacagttgaattgtcctaccttagaaattcatcattgatgtgataatactgactaaggtagacagtccacaggccatccggaaaatctggaaacattgacaaatatgcatgtcattgtcaaggtcatatccaatctgtgaaaaataaatcatctgcatttctagacatctattagtattttaattctccccagctctccccaaaacatcctttttagctgcttttaaaaaattcagcgtccgttgaaagcaccagtgttgcctatgacctgcctttttacctctttttacctagaaagtctcacttcttttttgggagactcttttatgacagtgacattgcgctgtgtccaggccagttcttttataaaatgttctacgatctggattcatgcatgtatttccacttgatgctgagtattttaagataattcaagaatcaggttttcgtacaaaacaatcgcaatgcttcggcactgcacaggccacagaagcctgcggctgcctccggccccgcctgctcccgctcccccaggcctgccctgccctttttcttctctccctgcttctccctcgccctcagcccagcagcgtctcatgggcagtccaggctttcggggccaggttgggcagcagcccctgcagccggtcccactgagtctgccctgccttccagattctggtacaggtcaaagaggtcctctccaagctgagcacgctcgtggaaaccacactcaaagaggtgcgcgttgtggggcagtgcggggagggccagcgggggtgggctctctggctggggaggggccacagagctcaggaactcacggatccacctccctctctccctcacaccccacccctgtgcctttcctcctgaatatcccatttctctcctggcctcttggtcttcgtttgtgttccctgcttgtgtctcttgcatgattcttcttggtctactgtgaactcttacccttcccctcacctctgccccctccccacgtctctctctcggcccgtccctctccggtggcctcttttctttcagacagagaagattacagtatgtggggacacccatggccagttctatgacctcctcaacatattcgagctcaacggtttaccctcggagaccaacccctatgtatccttctcagcagagccaccctctccccacctccacccccagccgcagcctcaggtctgcacagagtgggaggagcccttgccaggaaaagacgtgaccttggaaaggagaggcctggccatgctggggcaccaaggtgtgggtggagctgcaggctggccatgcaccccaggctccaggctcggacaggcctgggccagcacccacctgctgtgtgacctaagctggtagctcagtctctctgggtcttggcttgtcttcgtctgcctcaggatcacatttgaatggcacctggcactggccacacttgggttccatcctggctttgccacttcccagctgtgtgaccgaagcaggttacttcactgcttggtgtcacagtttccccatttgcaaagagggataataatatgtgcaaccttgttactcagcagttactgagaggacaggttaagaacagggcctggcccacacctgatgctatctaagtatttccccgtgttatggtatctgctcgatgaacggccacttgtagggccactaggcctatgcattgttgagtgggagggcccgtgtcccatctcccccatggctccaggcctctctgaggagagctgaaggaggtggactgactagtccccgcacctccccgccactggctttccgggagacaggaggcagggtcctcagtgccatactactgaggctcagcggccaagctctggctggagccacggtgaggaaaggattagaaacccagatcccttgagccctgccaagtcctcactccctgggaggtgctgacaggaggcttgaggccaggcaggagcagcccatctggcccatcttctgccaccacccccaaccccaccgcaccgcacccttcccctccacgcttgccatgttttcctcagcaggacagatatttaatggtgactttgtggaccgaggctccttctctgtagaagtgatcctcacccttttcggcttcaagctcctgtacccagatcactttcacctccttcgaggtgagctgggaagtgacaaggtttgggttcattgtggggtcctgagtggggcactcactctgcaaggataatagttgcagctgtatttattttgtggactcggagatcatgcacagggcgaccttttaagattgagtatgtagtgcactgcacaaaagcatcacaccaaaggacgcgtttacatcatagatagtgtagaaatggatgtttactctgaccatttttcagcagatggcaaacaagggtgtgaggatgggccccttattctaatttgcacaagggcatgaaacaggctcctgggtggccctaaatctggcactaaagctgagtgactgagtgaacagaccagggctcgagggtgggagtaaggagactgttgacgaggcagttgtgccccctcagattcaggcttggtgtcagatttgggttctcttgattgaagtagagcccggagctgagtgtgctggttcacacctgtaatcccagcactttggaaggcccaggtaggaggatcacttcagcccaggagtttgagaccagcctgggcaacacagtgagactttgtctccagtaaacattttttaaaaaggccaggcgcagtggctcatgcctgtaatcccagcattttgggaggccaaggcaggtggatcatctgaggtcaagagttcgaaaccagcctgtccaatgtggtgaaaccccgtctctactaaaaatacaaaaattagccgggcatggtggtacacgcctgtaatcccagctgcctgggaggctgaggcaggagaatcgcttgaacccaggaggcacatgttgcaatgagccgagattgcgccactgcactccagcctagtcgatagagtgagactcagtctaaaaaaaaaaaaaaaagccaggcatggtggcaccgtgcacccgtagtcccagcttcttgggtggccaaagtggaaggattgcttgagcccaggagtgtaaggctgcagtgagccatgatcacaccgctgcactccagcgtgggcaacagagcaagaccctgtctctttgaaaaaaaaaaaaaaagtaagaaacttggaagtagagcccagagtatttgctggaggaacagacacaggtgtgagacaaagagggaacgaaaggggccctctagggttttggccggagtatctggagggctatggctgccagtgacgaagacgggaacatgtagagcagggtgtggccaggagctgaggagctcccctttggatgtggctgagactcaggagacatgggatgtgggtggggttccaaggggtgttgaaaatgtaggtttcttggtgtccagatgagattagacaagaggagctcactgggatgtgagggccacacaggggaggccctgcccatggcggggccggggtgagttgggaggtgagtgataggctggggcgaagcctgcatgcccgtgtccctgggctcacagggttcacgcagcagtgtccagcacagggtcaaagctcaggaagcccgactgtgggcctcgttgcaggaggcaacaagtgctcaggccgagaagtcagacaagcagagtctgagcagatgcgagactgggcagccttctccttgcccccaagctctggaagggaagaaggaggccgggtgcttgtgtctgagacagaaggatggagctcagggtggggtgggctggggcacatgttctgtagatgggcctactttttggttttgagacggtcttgctttgctctgttgcccaggctggagtgcagtagcatgagcatagctcactgcagcctctgcttcgtgggctcaagtgatcctctggcctcagcctcccaagtagctggcactataggcacgcaccaccatgcccagctaatttttaaaattgttttatagagaggtctcagtatattgcccaggctggtctcaaattgctgggctcaagcagttctgccttggcttcccaaagtgctggaattataggcgtgagccatggtgcttagccatggacctactttttgtcaagattccccccttggtacctccagtctggaaggcaccgcagtggcaagtgcgaggcccatgggggcaagggacgcatgcacagttctgggccttgagggtgccaggctggaggacactgatgtacctggaggctgagctttctcttctgtccccgtgttggccaggcaaccacgagacagacaacatgaaccagatctacggtttcgagggtgaggtgaaggccaagtacacagcccagatgtacgagctctttagcgaggtgttcgagtggctcccgttggcccagtgcatcaacggcaaagtgctggtgaggacggcgcgagccctgagtgtgggttccccacccagccacacctgggcagatgtgctggtgaaggaagttggggcctgtgggtgggtggcaccttccctcacagcggcatcccccatctccccagatcatgcacggaggcctgttcagtgaagacggtgtcaccctggatgacatccggaaaattgagcggaatcgacaacccccagattcaggtgagcagcgcggggccaggtgtctccagcagaaaggggcagcctgggctgagctctcccctgcaacccagccctgcctcggaggatgggctttgtgcccttggcaagaaacagcgggtctgagcctcagtttcctcacctgcgacttgggccagtgcacctccttcatggggctgtgatggcaagcacggtcgtgaccatggtgcggggtgaaggcacggtgaccgccgagcacacctgtccttatttatttgtgagttcagctgtggaaccctggaaggaggggaggtcttggggctcctgtgctagtgacgggcacacttcagagagttcacccacaggtgcacacgcacgtgcacactgtgagtgctgcagaggacatggattgggtgggctggtgctgggtgctcaggaaggcctctccagggaggcgaggtttgagctgacactgcgggaagcagaggcatctgccgtgcacagagcctggcgagcatattccaggcttgaggaggggtcctaaggcagggagaagttggcgagtgggcagggctgtgctttgagggctgacattggacatggggttcactgggcccaaatcctatggcgctttacaggccccagtgaggaactttgttcctagggcagtgcggagccaccaaaggctttgagtgggagaggggcctgatctgaatagtgacattgaaagctctatctggcttcggggccacaggggattgaatggggtctggagggcagatcagcagagagggtgggggtggctcagaatcacagtcacctgtcctgaatgtccatgtccatgctggatgtcccctgcccaacacccacccaggctgggctgtggggtcagcacctggccgggccaggaggtggcctgtgagtgaccacccccggggaggtggacgagtccctaatgtttccctcgctccccaccagggcccatgtgtgacctgctctggtcagatccacagccacaggtgagtctagggtggggtgcagggccggcgggtgtgggctgtggcagcaggtggaggcagacagtcaccctgaacccctgtctctcccttctgcccaccctcagaacgggcgctcgatcagcaagcggggcgtgagctgtcagtttgggcctgacgtcaccaaggccttcttggaagagaacaacctggactatatcatccgcagccacgaagtcaaggccgagggctacgaggtggctcacggaggccgctgtgtcaccgtcttctctgcccccaactactggtatgtctttgcctttccagcccagggcctctaccaagccacgggtttttgtcttggtttttgttttgcctttttatgatggaacatttcaaagacaggcaagagcagataaaagaacatgacgaacacccccgtatgtgtcacccacccatgcagcaccagtggggccagcctgtgagtgctgaccagctgccctgtgttacagcaagcccctggcacttcacctttctcccactgattgcccagcacttttcagaaggaaagggatctttttcttaaccacaatatcgtgtttacacttttgagtgctggctgggcatggtggctcacgcctataatcccagcactttgggaggccgaggtgggcggatcacctgaggtcaggagtttgagaccagcctggccaacatggtgaaaccccatctctactaaaaatacaaaaattagcagggcgtggtggcacacacccgtaatcccagctactcaggaggctgagtcaggagaattgttcgaacccgggaggtagaggttgcagtgagctgagattgcaccactgcactccagcctggggaagagtaagactccatctcaaaacacacgcacacgggcaagagtaagactccatctcaaaacacacacacacacacacacacacacacacacacacacacacacacacacacacacacacacacacacacacacacacacacacacacacacacacacagtgttgatcccttgcccccacccgaatcctgccaagttctctttctcctggtctctcctaagtgtcttttccagctgacttcttccagacaggacctaaacaaggaccacattttcagtctctttgcctgtgagttccctgtctctccccacccgcatcatttatttgttgaagaataggttgctgcctgctgtacgagtcacctgtgtcctggactaggctgactgcatccccgtggtgccgtgtgacatgttcctctgttccctgcatctctgggtgggcaaagctagaagcgtggtcagattcctagtggggtctggcgagcatccacctccatgagctatgccctgccccttcctgctcctgcttcctgcactcccaccctcttttccccatccccatcctcctgcccctcccattctttcccctggattcgtctttcccatctctgtctctctgtccatctgtgtctgttgtggctctgtccctccctctccctctgtcccttcttgcccagccattccttctcttaacccaccagccccacccagccctgaccacactgtccactctgctcctgtccctgcagcgaccagatggggaacaaagcctcctacatccacctccagggctctgacctacggcctcagttccaccagttcacagcagtggtgagtcacccctcagggcccctgccccttccatcccggcctggggacaaggaggctgagaccctggtaaggggcaggggtaggttctgccggtgggtgctcaggggctctgttctgacttctgtccatcccacctgccctggtcccacagcctcatcccaacgtcaagcccatggcctatgccaacacgctgctgcagctaggaatgatgtgaggtgacgggcggggcggcctgcatcccagggcccctccaatcccaccggacccaggccctgggctaggggcagagcaggccccgccccagggcaatgttggacccccttttactttgtaaagtttgtatttattcccctttaggtttgcagagggggtaggggcagagtcaggggctggccagagggtctgctccctggacagagaggaaggaggtggagcagctggggctgggggcacagcctgggcattctgtggggaggccgtcctcggggtggggtggggccgagtggctgccctgcccccctcatttgcatggctcctcccccactcaagcaatagggccccgccataggaagacccccagagagagggtcagcaggggggccccgcctgcgcctcccctcctatagccccatggtggggctaggctggggctcacccccctccccagctattttatgtctgtaattaaatatgttaaaataaagtcattatcggaagtcagcttgtctctggatggtggagccgaaggagctgcccgggttgggttacgcctgctcaggagatccggagggtggggaggccgcaaagtcccgctggccgggcccacccagctctgggctgaccgcccaagtggcctctgcctctgcccagcaccgtgggctcctggggagagttctgccccctgggtggggcgatgaggccagcactgagtggagcggagcggaagctgaggcatagcctcatcctttgctggctccagcaacaagcatgacagtgccgctccctgctccctgctcagggtaggcccagcagtggttcttgacatcacacgatgaggcgcgcatctcccgtcatccagggagaccagaggacccttgtctcactcccagttggctcttagtcacaggtaacgttggattccattcaggctgccctgccaggccttgaccctccagagagattgtgttttcaagtttgagctcctctggactcagctttctccagtggtatgtggcactgggggatggtctacagcaaatgactcctgcagggccgagtccgggagtgtttggccctttggagacctcccaggcagacatgaggcgtccgcggtcctgattgcgcgtaggcgctggggaggtgttctctaaggcccatcagccttacagtaagtgcaccgccttctggggtcaggtgcgccacggtccagaagccaagtacacatggcttcaggaaaacaggcacgaggcccaggttgccagtgccattcatttctcctgggaaagacaaaaacagccaccatgactgtcgggagggtgcttcagacctgatgggagtcagccaggcgggcagctgtgaggctctcagactcactgggtgtcggggttccctgccgctgcagttcaggaggtctcccaggacccggtatggtcattatcctcacagtgagggcctattatagcaagaatatggggatgagaatgagaggagggaagaggcaggcgcaagcgtcccactgccctctcccgtggagctgtgtggacagcgcttattttccccgcatggatgcgacagcgtgctggagtgtggccacctagggaagctcacccgggcctctgcatccaaggttttcttcaggggttggtcatggggactgctcaccccgcgtggctgaccgtagcctccagagagacccacggcccccaccctaaatcacatccttagcatagactgtccactgtggcccagggccccagataaagagacgctcctatgaggtaggacacaccgagggctctccggtgacctcccaggagccagccttttcttccgtcagggctgcagccatgctgcacagctgcataacaaacaccctaaccccccccaccccctcagcttcaacaacgaatgccttgctgtcttcctcagttctgtgattggctgggcttggccgtgcagggcgcacctgagggctgaggcatttgtggtcgggggcatttggggctggaggcatctgaagactcgcccggctggactccgtgggggctcactcccgtgacggcagttgctgtgggctgttagctgggctggcactggaacgcctgcgtgtggcttccatgtggcctgagcttctctcaacgtggcagcagggtccctcaagggagcattaaatgtttatatttaagtcaaccaactgcattccagctgtagctcttgcctcagcaatgtcctgccacacattcaattgtctctttcatttccttcaatctggaacatttcctcagccccgctttgtctttgacatggacgtttgtgatgatcacgttcctcccgctccccgtgtctgaagagtgctccctgactggctgccgtctcctccctgtcgggtctggctgggttctccagagggagtgctgcggaggggacacagcagaggccccatgctcgtgatgtatgttgcagatcattttcccccattctgtccttttttgttaaattgtggtaaaaagcacataacataaactgtaccaccttaaccatttgaaagtatatatcccagactgtcttttatctttagacttcacttgtggtttgttgccacagtacaagtttatttttatgaagccaaatgtatcagtatttctttaattgtgctggcgtgggagtcagtacttctccctacacccgggtttcagggaagttccctcgggtttcttctggtttttgtacagttttcttctttatgtcaagatctccagtctatttggagttccttcttgtatgtgatgtgaggaatggatctaattttatctttttccaagtggatattggaggaagtttttaaacgagaagagaaattcagaagatgctgcaagagatgggacctttacggcgatcaatgtctcagtaaagtcagaacaaagagactcaggcacacccaccacaagtaccaaaactttgagcagatcaacgccacagagctgggctcgggaaaacggaagggccatgggagggagggaaagcatttaatgggggaaggtctgggtaagccgataagttttggggaatcaagggggataaatacacgtgagtagggctctgaagttagaggcaatgaattgaccaaaaagaaacagtaacttccaaaagggagtgtgacggagagatgcccatagacgcaggtgatgaacatccagggctggccgggcacgggggctcacgcctgtgatcccagcacttggggaggccgagtcatgtggatcgcttgagcacaggagtctgctaaaataggggacaccactctagttacagtttggatcagggtcatcacgctggggacgtgccaggcacacggaggtgggggagatgctgggggctgggggcaggtgtggacactaagcaatggtgtcagaggctgctggggagtctcagggtctggcaggagcagatgtggactcccaggagtcatggacatgaattaggggtcctaagaagcctcgccactgacaaaggaagctgtgaagggaagaccagagaaccggggggagcgggggtcttaggtgctccccaccccatcgaccaggatggacccaggcatctgcccagctggatggaacagagactccaaggcaggaaggacccgagttctgtctccctgtcgttctcttggaccctttcacgctgtctttccccacccccatctgtcaatggccatgattagatcacagacccaagctctggccaccagggaaggcagaaagatgacctaacctccatagcaccgggtggggcccctgcctcccacctgtggggggtgtcagttgcttggcagccagagggacagaggccaccacccctcccctcccggccagcaccacagatggagaaactgggcccatggttccctctgcccacaccctcccatggctctcatctccgtggtccagcggatggggggaaacaggttgaggaatttggacactggaaaatgggtggaagcagttaaaacctgaggggaccaggaggggcagggtgggcacccatctcagatgagtcgaagagcagcagggtgattttccatgcccggccccttggctctgttctaagagtttacacgcattaacatttcattctaactcagtgagtcagacacttttcagatgcccattttacagataagcaagataagaagtacagagaggttaagttacatgctcagagtcacacagccagcaaatggcagaacgggacttgagcaccagctgactggctgcagagtctgtgccctgagccagtttgcagtagcattgagcactttatgtgtcaggcagtttacaggcactttgggtcctcgcaacagccccattttacagatgaggaaactgaggcacagaagcagcaatatacctgaggacacacaactaggaaggaggatagagcatattcggtgggagataataaaacctttgatgccaaatgctaaaataatatttggggaaaagcttttgaccccttttagcaaacaaaaattttatgatggcaagaatttatcctgctggttaatctgatttttccctttttagtacatgggtgttccctaaccttacccctgaagagaaaactcatgacttcccccagagctgtgcattctcaaagctttttttttttttttttttttttttttcctgagatggagtcttgctctgtcgcccaggttggagtgcagtggcgcaatctcgctcactgaagcctcccctccccctcctgggttcaagcctcgtaagtagctgggattacaggcgtgtgccaccacgcccagctaatttttgtatttttagtagagacggggtttccccatgttagtcaggctggtctcgaactcctgacctcaagtgatctgcccgcctcggctgcccaaagtgctgggattacaggtgtgagccactgcgcccggcctcaaagcatttttgttagcggtctttttaagatttctccaccgggtgtggtggctcacgcctgtaatctcagcattttgggaggccgcggcgggcagatcacgaggtcaggagtgtaacaccagcctggccaacatggtgaaaccccgtctccactaaaaatacaaaaaaattagccgggcatggtggcacgtgcctgtaatcccagctactcaggaggctgaggcaggagaattgcttgaaccaggacccaggaggcggaggttgcagtgagccgagatggcgccactgtattccagcctgggctacagagcgggactccgtctcaaaaaaaaaaaaaaaaaaaaaaaaaaaatttctcttgtaactgttctgtgattgtccactgtatggcgctagggggcgctgtaacaccacggtgttttatagtcattacaacactcttccagcagatggcggcaaagtgttggggaaagagggtgcctttttgccaatccccatatatttttctaattttctttgtatggtatgcaaacatttccaatgctcaaaatttggtctcagctaccattctaactatttgaggcttacgcttctctgtttcccctccaatctgggccgaagtcttcctgtcagtgaaacagggatgtttaaaggagtttttttggggcccctttcccagagctgtcctgatggcccatttggggcagtttctctctttttggagcgtggagctgctcttaaggccctgcctgctggattctcaaatagcatggtggacactcccctccagacctcctctgtgggcccagcctcccctctcttagccccttggagttcctgccccttttgggccccaaagtcctgtctctaactcaaagacagttagttatctgtgttaaaataaaataacatgggccgggcgtggtggctcacgcctgtaatcccagcactttgggaggccgaggtgggcggatgacctgaggtcaggagttcgagaccagcctggccaacatggtgagacccgatctctactaaaattgtcaaagaacaaattaaggtgtggtggcgggtgcctgtaatctcagttactcgggaggctgaagcaggagaattgcttgaacccgggaggtggaggttgcagtgatcggagatcgtgccagcctgggtgacagagcaagactccatctcaaaaaataaataattttttaaaaatggagaccaggactgagaattccccaaagcagacaaaagcagttaggccatgtaaacacaacttaatctagtttgacttctgaatgtgagtgaaacttagcttattccctgtaaataaatgctgctgagaatcataaacaaagctgaaatcgccttccaaaaggatgtaagacaatcacttttaaccgatcccttgtcatatggaagcccccaccatcatagtcggtcatcgtgaaggtgaagccacctcctggtttttgcttttttttttttttttttttttttgagatggagtctcgctctgtcgcccaggttggagtgcagtggtgcgatcttggctcactgcaagctccgcctcccgggttcacgccattctcctgcctcagcctcccgagtagctgggactacaggtgcccgccaccacgcctgactaatgttttgtatttttagtagagacaaggtttcactgtgttacccaggatggtctcgatctcctgacctcatgatccacccgccttggtctcccaaagtgctaggattacaggcgtgagccaccgcgcctggccttttttttttttttttttttttttttgagatggagtctcactcttgtcgcccaggctggagtgcagtggtgcaatctccattcactgcaacctctgcctcctgggttcaagcgattctcctgcctcagcctcctgagtagctgggactacaggcacccgccaccatgcctggctaattttgtgtatttttagtagagatggggtttcactatgttggctaggctagtctcgaactcctgacctcgtgatctgcctggctcggcctcccagagtgctgggattacaggcgtgagccactgtgcccggctggtttttgctttctaagccatcctacaccagcctgcctctgagttgcttaccgctcagattgaagtctcctggatgacaattcgtgctttttgcatgacaataaacttttttttcccccccctaattggagcctattttattctggacattttgggggaattagaagtgagattcaaagaagatcccaaggagccctgactgcagggagtaaccaggcatgggcacccacacagccagctgtgttcactactttcttgctaaccaaggggtttgggataagtctttttcggatctgagcttccttctcttcacctttgagctctccgtttgtcacacaaaaggggccgattctgtttgtttctatttgtctgtctgagtttgagctcgggtaagtcattctttcctgttcaataatggaggaggatctgtgtttccctgcatcctagaatggtaaccccctggctagacaccccatagcttatttggcagagtctcagaggaaacgaaggccagggtgcattcagaacatcccagtattctccatctagaactctacctgcttatatgtttaagaactatggccgggcgcggtggctcacacctgtaatcccagcattttgggaggccaaggcagggcggatcacttgaggtcaggagttcaagaccagcctggccaatatggcgaaaccccatctctactaagaatacaaaaattagccgggcatggtggcaggaacctgtaatcccagctattccagaggctgaggcaggagaatctcttgaacccaggaggtggagattgcagtaagccgagatcgtgcctctgcactgcactccagcctggcaatacaccgagactccatctcaaattcccagtgtcagccaggcacagtggctcatgcctgtaatcccagcactttgggatgccaaggcagggcggatcacttgaggtcaggagttcaagaccagcctggccaatatggcgaaaccccatctccactaaaaatacaaaaattagccgggcatggtggtgggagcctgtaatcccggctactccagaggctgaggcaggagaatctcttgaacccaggaggcggaggttgcagtgagctgagatcgcatcactgcattccagcctgggcaacagccaaaatactgtctcaaaaaaaaaaaaatagatagatagatagatagatagatagatagatagatacatacatacatacatacatacatacatacatagatttttatggatctctctgagatccctgacactgtatgggcctcttcttccacagatgtgggcaaaataaaaaatgctgaacctatgaaaattcagattaatctttcaaaaccactgttgaagttgtctcagtacccgctttacaaaaagccatacatgtgcaaactcctacaacagaagatttaatgaaacgggctatttcttgtaatgttcctatcctgttttaaaaaatgtacagatgaggatggatatttgtacaagatctcgatctccatgggatctttactacacccataaataaaacatttaaaaatgtcccgtatacatatgtaacaaacctgcacgttgtgcacatgtaccctaaaacttaaagtataatttaaaaaaagtcccatagtgcccaaccccaacaccctattgatgaaggtgccaaatgattccaaatcgaatggttcacaggagtggacatatgctgtctgtggttttttttttttgttttttttttttccccagacagagtctcactctgtcgcccaggctggagtgcagtggcgggatctcggctcactgcaacctccgcctcccgggttcaagcaattctcctgcctcaccctcccgagtagctgggattacaggcgtgcgccaccgcgcctggccccaacctgcattttcattggttgcagggataaaaggcaagtcccaccagaaaatcaatgccaaccaggaactgagggtggcggtgttcagtctgttcccagggttttgagaactggtgcagtgcctaacaagcacacacgttccccttagtaaggaaatacggttaagaatgaagtaaaaaaaaaattgttttctttcaatttatgtgtctatatattttcattttttatgttaataaagacaaggtctcgctatgttgcccaggctgatctcaaactccttagctctacatattttcaaatggctactaacttcttaggacataagagcttaggttgtttagacctcaccagatgagaatggaactgttaggtatttctttgggggcgctatggaaaaaatgactgaattactaaggtctggtgcaccaagcaagtccagagccacctgcaccagggcacaggggttgagagcctgggctctggagtcagaagacctaggtttgccacctcactttgccatccttgggcattgtgcgacctctgcgcctgtaaaacgggaatagttaacagttgtgggattagtgacaaagcccatagaaaacattcagacaggccgggcgtggtggcgggcgcctgtagtcccagctactcgggaggctgaggcaggagaatggcgtgaacccgggaggcggagcttgcagtgagccgagatcgtgccactgcactccagcctgggcgacagagcgagactccctctcaaaaacaaacgaacaaaaacattcagacaatccctggcatgtcttagcaggcgataaatgttagttttataaatttatttatttaaccaaaatggactcattctacatatgtatttctatcatttttttccttattattatctggacatttttttctaggcaggcctgtaaggatctttctttctttctcttgccttccttcttttttttcttttttcttttttttttttttttttttttttgagacagggtcttgctctgtcactcgggttggagtgcagtagcacgatctcagctaactgcagcctccatctcctgggctcaagctatctcctcccacctcagcctcctgaatagctgggaacacatgccaccacgcccgactaattttttgtagagacagggtttcaccatgttgcccagtcttttctcactcctgagctcaagccatcctcctgcctcagcctcccaaagtgctggaattataggcatgagccactgcgcctgggcaactgttctttctaatagccccctagtctgcatccttcagggacttcttaaagtaaaaacgtccagccaggcgcagtggctcacgcctgtaatcccagcactttgggaggccgaggtgggtggatcacgaggtcaggagatcaagaccaccctggccaatatggtgaaaccccgtctctactaaaaatacaaaaattagccgggcatggtgacacgtgcctgtaatctcagctactcggaggctgaggcaagagaatcactggaaccagggagctggaggttgcagtgagctgagattgcaccactgcactccaacctggtgacagagcgagactccgtctcaaaaaaaaaaaaaaaaaaagaaaaaagaactccaagacttcaaggttcccctgaagcttggatgcaaacgtaaagcctgacctatcctcattgataaataggcccttattctcccttcccttccattacttccctccttctcataggaaggcattccatttcttcatcctgccatttgaggcctctgcctctgtgtcctgccctggctaaggcccctgcctctgtctccaccatgccttgtgaccctggagaggtccctcaattccttaagccacaggttcctcatctatataatggggatgataataatagaagctgcatccctgggctgctgtgagaattacagagttcaacccccaaggctatgacgaatctgcccgtagtaaagagtgaggctgggggcggtggctcacccctgtaatcccagcactttgggaggccaaggcaggtggatcacttgagatcaggagttcaagaccagccaggccaacatggtgaaaccccgtctctactaaaaatacaaaaattagccaggtgtggtggcaggagcctgtaatcccagccattagggaggccgagggcagaagaatcgcttgagcccgggaggcaaaggttgcagtgaaccgagatcgcttcactgccctccagcctgggtgacaaagcgagactccttctcaaaaacaaacaaacaaaaaaccaaactgttcccctgaacttgtttttttgtggcagcgggtggcagctgggcctgtcagatagaggctgatttggaatcaagacatcggtcttttggggcaaccgttcagattctgtgagtttgaaaccacaaatgccaaagtttaaattgggagactggaccctgcaggcactatttaaatccctttttgtgttacaaatagtgaaccccccctgctgccatctgcaggccactaaagtgtccattccacatctgagtcctgggcgattctgaagtgggatcccgaggacagagatactaataagttggctcacgcctgtaatcgcagcactttgggaggccgaggcacgcagatcacgaggtcaggagttcgagaccagcctggccaacatggtgaaacctcgtctctactaaaaatacaaaaaattagctgggtgaggtggcgggagcctgtaatcccagctactcaggaggctgaggtaggagaatcacttgaaaccagaaggcggaggttgcagtgagctgagattgtgccactgcactccagcctgggcgacagagcgagactccgtcaagaaaggaagggaggaagggaggaaggaaggaaggaagggagggagggaggaaggaaggaaggaagggaaaggaaggaaatgaaggaataagaaaaaagaaaataaaagcaaaggaaaagaaaagagaaaagaaaagaagaaagaaaaagttgtgtccattcccgagtcaaacttagactccggacctcttttcccagctgccgccagggggcgcaacgtggctcattgtctccaaaaaacagccgctgtcaattcttcccttccccgtatgcccctggtacctccccccgtcaagaggtgaagtctatttcccttccgcttgaatccagactagccttatgacttggtttgaccaagaagttgagtcccatcgaatgactcctcttctcttcaaatcctcttatggcttcctatgtcactaaaggtcaaagccagagtccttataacagggtctggacctgttcagtgcagcagccactactgacatggggatattttaatttcaatgtaactaaatacaattaaacatccacatcctgaagtcacagtagctacatcgcaagtgctcaagagccacacgtggccagtggctaccacatcacgcagtgctggtgcaggacactgccaccatcgcacgcagttctcttgcacagctcaggtctacacactccgcctccatctcaccccctgccttgtttcccacctccctctctgtgtctccccccgtggcttcagccacccaggtctccgggtcacaccaggcatattcctgcctcagggcctttgcactgctgttctctttcttcaaatgtcacattcccagggagggcttccctgaccacctataaaaatgtaacccaggctgggcgcagtggctcacccctgtaatcccagcactttgggaggctgaagcgggcggatcacctgaggttggaagttcaagaccagcctgaacaacacggagaaaccccgtctctactaaaaatataaaattagccgggcgtggtggtgcatgcctgtaatcccagctactcagaaggctgaagcaggagaatcgcttgaatccagaaggtggagattgcggtgagcggagatcgcggtgagcggagatcgcgccactgcactccagcctgggcaacaagagcgaaactgcatctcaaaaacaaacaaacaaacaaaccctagcctggctcggtggctcacgcctgtaatcccagcactttgggaggccgaggcgggtggatcacttaaggtcaggagttcgagaccagcctggccaacatggagaaactccgtctctattaaaatacacaaaaattagccacgcgtggtggcgcgcgcctgtaatcccagctactcgggaggctgaggcacgagaatcgcttgaacccgggaggcagaggggcagtgagctgagatcgtgccactgcactccagcctgggtgacagagcaagaccccgtctcaaaaagaaaaaaaaaaagtgaccttttctgcacttgctcgctttatttttcggagctctgattgccctggttcactcatttgtttctcaatagcacgccgacttgtcaggaaggttaatagaggaaattggtgacacagacattgcaatcaggaagggctgagagtagcaagtcaggtgggctcaccattagcaatgcagggagctgctgtctcgtgaggattggaggagccacgtggaaaatgctgctgcccggagcccaggtggctgcgctggccagggagaagcccctggttggcggcggtggccgtcactgctgctgctgcttctgcagccaccacggcccaagcatcccccagatggcgtccccttcctctggcttcctctcccgtagcaacagcagtccctgcagaggactctggagtggtggttgcggggtcctaccccgcagggggcaggtgggcgtggcggggagaggcagtagagtcgctcagggtcagctctgacctgtccccgcggtgttcccggccccagcagctgctcagttatttgtcgagtgctgacggtcggtcggaagaaaccacccggactgaggaaggctgaccccagatgcgcctagttgggaatgtgctggaaagatacgccccctggagggagtgcgcccaggaagtggggaggagcgtttgagatcgaaggagtggccgcgtaaaggccctgaggtctcgcaaggaagggtcccggggcgtcccaggccctgttctaggtgcaagaaacaggaacctcctggagcgagcatgcggtggggaggcagggggtacgcctcctacatgaggaggagatccacgcattaggaagtgaggcctgctggggacaaaagtctggcaggcagggccccaggagggccggggcaggagagggtttgcagtcatcgtaaacggggcggcatggaaagccctcactgagaaggtgccaaagaccccaaggaggtgaggggttgcggccggcagatgcctggggaaagcgcatgaccggaagcgcaggaagagccaggttaaaagccccaagccagagtgtgataatatggggctgttaatgtgtgactactgcccctcccgtgccaggctcggtgctggcgtaggggaggcagtggggccaaagaaggccacctgcctccatggtggtcgctgtcgggttggatttccacgtgcctggagtttaaaagtgaggcagcctggaaatgagcttgcagagttcgctgggggcgtgggggaggtttggccgtgcagactttcagatagcgggcccaggcagggacctcgatcctgaacccgcccccaccccgatcccggagccagctcagacacaggggcgcctgaaaactcctagggacatgaccaggtgctggagggagggagaagtctgggttccggggacagaaaaagacagtccctaccgccaacgggttccccagacccggtttccactgaggccccaccttccccagcgcagtcttcgccccttgcataggaggccacatctcctacacgtagatatgcagagagcgtgtcaacgcgcaagagctgcagcgccccatttaaccaccaagaggctccagggccgctggttaaaatcgtgcgggaagagatagcttgacgccaggagttcaagaccggcccgagcaaaatagtgacccacccccaacccccgctccccgcctctcgtctatacaaaaataaatatacataaataaaataaaataagcaaataaatattacatcgtgccggcgatggtgtttcccgagcactcgaagcgcctaagttttccctggcctttgaacgctagactgcagaaagcggcaggacagcggttctcaaagtcaggttctggaccagctgcgccaacgtctcctgggaactagatacacatgttcgggcccacccgagacctacagaacccctttgggcaggcagcccggcaagctgaattttcgaaggaccccccaggcacctgcgatacgggaccagttggagaaacggtccggcatcacagtttgagaccccagatgtggggtctgatggtctctaggacccctagggtcacagttgtcagccccggctgcccattgctgggaatcacctgggaagctttagggactgttgctgccccagcggaggcctggcaccatcccgagattcccagagtgggtcctgtgtgcatgctggacatgggctccgggtcatttcagggacagccggggcggggactgctgccctggggtctctgtcaaggccgatgtgtgcagtgaaaaactggccgctgctgatacctagcaggaataagacgagatgacgtctcctagggttgattggagcacgaacacatcacacccttttcagtaccctgagcaatgctggaaggaaagctctgctatgatccccctttcccatgaggacatggagtcacagagaggtcaagttaccagcccaaggtcacacagcttgcaaggagcggtgctgggggagccaggcagctgagctccaaattgctctcctgtcacaccctgtgggcctgggagggagacccacaaatcagaaatccttccacccccatgtctttttttttttttttttttttgacagaatctcgctctgtcacctaggctggagtgcagtggtgcaatctcggctcactgcaacctccgcctcctgggttcaaacaattctcatgcctcagcctcccaagtagctgggattacaagcacctgccatcacgtccagctaatttttgtatttacagtagagacggatttttgccatgttggccaggctggtctcaaactcctgacctcaagtgatctgcccatctcgaccccccaaagtgttggaattataggcgtgagacactgtacgcagcccctccacccccatgtctcagggtggcatccctcccttccatgtctgtgttctggaatcacctgtggcctcttattttcctctttggtaaaaatgaggagcagctgggtcgggcacggtggctcacgcctgtaatcccagtactttgggaggccgaggcgggcggatcacgaggtcaggagatcaagaccatcctaacacagtgaaaccccatctctactaaaaatacaaaaaaattagctgggcgtgatggagggtgcctgtagtcccagctactagggaggctgaggcaggagaatggcgtgaacccagcaggcggagtttgcagtaagccgagatcgcgccactgcactccagcctgggtgacagagcgagactctgtcacaaaaacaaacaaacaaacaaacaaacaaacaatgaggagcagctggactggtccagatgaaggctgattcagagaccaatctctggtttcctgggcttcctcttggaaaccttcgtgcatttgaaaccacaccccagaggcatcaagggactgactggccctgcaggtgctgtttgaaggcccctgcgctgaaatataatagcgaacactctgttctgtctcagttactagagggctcccctacctgtggggcctccctgaatgctcacggtggggatgctgggaacagttcagaaaaggttgtgttcactcggggggcaacaaattttgactcagtgggggatagacttgcccaaagcctcagggccacccagaaaggctatgcaaataagacccagggatggccgggtatacaagtaagactgggggggctgaggcacgagaattgcttgaacccgggaggcagaggttgcagtgagttgagatcccaccactgcactccagcctggttgacagagactctgcctaaaaacaaaaacaaaaacaaacaaaaaaacccagggagacggtgtgaaactgtttcttttttcttttttgagacagggttttgcttgttgcccaggttggagtacaatagcgcaatctcagctcgccgcaacctcctgggttcaactgatcctcctcctacctcagcctcccgagtagctgggattacaggcatgcaccatcatgcccagctaattttttgtatttttagtacagatggggtttcaccatgttggccaggctggtctcgaactcctgacttcaggtgatccacccacctcggcctcccaaaatgctgggattacaggcgtgagccaccgcgcccggctgtgaaactttctgcaagcatctgtgtgtctgtgactgcctggcttttgagtttgtgtgataacatgtgagtgtgtccatctggctgagggaatcaaagtgtccaacggcatctagcagtgtgtgacgggtcctgagtgggtgaacacgttgacatttccaagtatgtcagtgtttgtatgaatgggtctgtgaatgtgtgggggttggcttcccggagcacagtgggtctgtgcgcctctgtgagtacacgtgtgtgtactacatgtgtgtgtccgtgtctgtgtctatgtatgggcagattaatcataatttctgttggtgaatgtgggtctgccagtggtgcctgagtgtacatgtgtctgtggtatgtgctgtgcctgcgtgcctggatccgagtgtgcatgtgtctatgtgtgtgtccacacgtgtatggcagtgagagagactgacccagtgttgcctgatgtctgtgaaatccacgcagctcctcgtttaactccatcttgccacttgtttggggtccacaccactttccttctcatgggcccctgatgttcccccgagacccccccccccccatagctctgggcgctgcagggaggaggagcagagagactcgctctgagccttcatttcctgcattcatgccgtcggctcctccagtctccgaatccctccaaacatctgtctctgctgttcctttttaccttccagctcctcaggcaggccaggtccccatggtcacgagacctctgccctccgaagtgggcagcgacaaaggacagcctccctccccaccaaccagaaccttcccacccagcctgtcttcctccgcgcacctgcaaagcctcccctccaggtgaggtccacagcttgtatttcttccaaacctcccagggcctcgttcttgctgtgagccgtggactacacggccaagtatccaccagcatgcacaaagcggctctagcaaggccatgcggcgcgccaggcagcaagcagcaccagcagtaaccactccactcagaaaagagcaggggtggggcgcggtggctcactcccatagtcccagagctgaggccagaggatcgcttgatcccaagagtgcaagtgagccgtgattgcaacaccacactccagcctgggtgacagagccagaccctgtcttgaaagaaagaaaagagtaaagaaaagagagaaagagaaaggaaagaaagcaagagagagagagaaagagagagggagggagggaggaagaaagaaagagggaaggaaggaaggaaggaaaggagggagggtgggagggggaaggggagggagagggagaggggagggagagagggagaggggaggggagtggagggagagagggagaggggaggggagtggagggagagagggagaggggaggggagggagggaaggggaggggagggagggaaggagggaggagggtggaagagagaaaaacaaaaggagggtggtgggatagaattctttactttcctgaggaaaaaaataagaaacttaggccaggcctgcaaccagttaggaagacagactggcctttggacctccacgaactctcttttctcctgccctcagcaaggctagagtgtggtcatttgctgtttttcactgctaggggttgtggggacacaaggcaatacaggcccccagcttcctcctaacctccacagggctttagcaacccagtttcttcccaattataggaagcagttggccgcgtgcagtggctcatgcctgtaatcccagcactttgggaagcagaggtgggcagatcagctgaggttaggagttcaagacaagcttggccaatatggtgaaacctcatctctactaaaaatacaaaaattagccaggtgtggtggcacacacctgtagtcccagctattcgggaggctgagggaggagaatcgcttgaaccagggaggcggagatggcagtgagccgagatcgtgccactgcactccagcctgggagacagagagtgagattccatctccaaaaagaaaaaaaaaaatgcagcagcaattaatgcacaatacacacagcctctttttttttttttttttttttttttttttgagacagagtctcactgtgtcactaggctggagtgcaatggcacaatctcggctcactgcaacctccacctcctgggttcaagagattctcttgcctcagcctccagagtagctgggactacaggcgtgcgccacaaggccagtctaatttttgtatttttattagagacggggtttcaccacgttggccaggatggtctcgatctcttgacctcgtgatccacccgccttggcctccctaagtgctgggattacaggcgtgagccaccatgcccggccaaccacagcccctcttttgggccttttcctattgcaatgatttttcaatgtgtccagtggccgagttgcccagatgtccgtggagcttgatgcaaacagaattcagagccacacaggcaccgctagcaaatccacacctctggtgccgagggccccagaatctgtgttttgaatgcatttttcagacgcttttactgtaccttataaccaagatcgggtgaggtgtgcaaaccaagggccctgtcccctccaaaccagcagagcccggggcatgaggatggcaagcgaagtgacaacataaacacaggtgtctccatcatcaaggatgggagtggaacggacagcaagggccaggtcacccccagagcattcgtcagttgtcaagtccaaagctaagaaatcagttcataaatgttttttgatttgcatgttggctcaactctttttaagtccaaggaggcagtccacattaagtgtgcaggcaaaaaagagatggaaaaaggagtcagtttctcccctgccctccctctctccctttatcaagctgagcaccttgagttgcatttgaggaaatgaaaactataggtgacgcaaccccattgtgtcgaattctttctttacattttttgggttgctacaaggaatcagtattttttttttttaatcagatggtgtgtgtggtggctcacatctgtaatcccagcattttgggaggccgaggcaggaggatcacttgaggccagaagtttgaggctgcagtgagttatgatcatgccactgcactccagcctgggcaacagagtgagaccctgtctctaaaaaatttaaaaaaaaatcaaagcatgaacaaaactttaacaagagaataaagagggttgttaggtggagacgtggccagcactccacctccactttgaagttcagaggcagagcatctctccctcccacacttggagggagggcccgtgggctgtctctagccctcacctcacagctggtcttcttgctctccctgctcagcttctgctctggcctcggccctcagcaccctgaggttcctggcctctcctgccctggggactctcttgggcagggttggcaaccggggagtgtgccagaaggctctccggcgcttgcaaaaccacgaaaagcgtccaggggtctggaacctcactgtcttgacctgtttccgggccctggctcctggagctgttcctgtggtcccttgggcagctgagacttcagcttcctggatacctggggcccctgccctctgattatgtgcagcctctgccctctggccagcccgggcctgtgccctctgattatctgcaccctggacagctggggccctttccctctggtcatgtacggcctcttccctttgattatctgtaacctctgacccctggtcagctggggcctccgccctctgattatctgcagcctcttccctgtggttatctgtgccctgtgacctctggtcagctggggcctctgccctctgattatctgcagcctcttccctctggttatctgcagcctctgccccctcctcagctggggcccctgccctctgattatctgcagcctcttccctctgattatctgcagcctctgccccctggtcagctggggcccctgccctctgattacctgcagccccttcccgctggtcagctatggcctcttccctttgactatctgcagcctctcccccctgatcagcctcgatgtctgccccctgacctgtgggtgctgtctgctccttcctgcggcgccgaaaggaggcccagttgatcttgggcctccatcgcctaggggaagcctggggcacacaaacatctcccgcgtttcccaagcgatcccccgggctggtgccctctggcgccgatgatacccctgcgctctccactgcggtggaggccagccgggcctcgcccaccccggggcccgccctcggcgcccaacccttcaccctccgcttcagcttcccccaggacacctggctgacatactcccgccacctgtccgctttggacagctgaggccccaggttgtcctcaaacatgggcactggcaggttgacgcggcggcgggcaggcggcgcgctgggctgcttctcctgtcgccggaggaaggcctcgaccagttcctcatcatcctcactctccaggtcgcttcccaggaacttgctgcccaggtagctgacgggcattttgcgcaccttcttgccccgccgcgggccctggcggctcttgtctctggaggtctcgaagtcgctgaactcgctgtcgctggcgttgctgctgtcgtacgtgcccacgaccagccggggcggaggagtcaccatctgctgcactctcctcctcactcggggctccttgggctttttggggggctggggcgggtgcggggtgctcttctccatgatgcgggccacgtcctccagggtgcggccctcttcttccaggaactgggtcagccgctcccgaaattctgcttccttggtggcgggcttagagatgactctccagacgcccccagccagcctgacctcccgggggatgagcaaatagtcgacgtcctccccgatctgcagcatccccaccgtggagtcctcctccttgcggaacaccttgccgatcttcttaaatgtccccacgggctttagggcttccacgaggacgtccaaatccacatctttgcagacatcggggacgctccaaagaatgaggcagtcgggggacggcaggaagccccaggggaaccagccccccacgtggcttttctcgagagtctttaagatctccagggtgatatctggggtgagggggcaatgagccccaacaaactactgtagcccttagtcttgagggagggactggatggggggagttccagcaacgctgaccggagagtctcacctccctagccagggacgagccaaacgcctccaatctcttcgcctgcaacaagtacagtcttgaccaagtccggctcccccaccaaggacttgggggaatcaatttccaggatgcctacgtgagccgggggcgaggtcagtcccaaggctcaaggcccactccaagctggaaacgtggtgtcccagctccaagttggggcgcgcgggctgccagcgactcttcctgccccaggccccagggacgcggctggaacttgggacaggacttcgcagacaaagacggtccagtcgaagctattcaatatggccgaggcgctgggaggccccagcccgggcctccagtagggtcccccgcccccaggcaggccgccacccagctccaggctgaccttgacgcgccgcagcctgccagcccgcgcgcttagagctctgcaccgtggagcgcgcgggcaggaagttcctcctcgccctccgccagaatgaggcccaccttcccccgtctcatcttacactcccagactctggaagactgacaggggggctgtccactcccttcggggcggcctccttcccctcccccacaggggtgtggccgcgccccgggcctagctgggcccattgcttcccagcgaagcggcagtggcccacgtcagcacctttcctgaaaggcagcggttcccaaacctgccatccgaaatgtgcaagtttccagccaagtccgggaggtgggtgtgctagtggattctactttttgagagccactggcaccacagattagcattttaaattcacgcgactatcggtacccgtacacctatatgcgtgggtagagaaatgggtacctgactgcaacagtcccactgtggcgcttggcaggtcagggctcaatacatatttttgaggggatgaataaacccaaatgttcatggccaggcgcggtggctcatgcctgtaatgccagcactttgggaggcccaggtgggtggaacacttgaggccaggagttcgagaccagcctgcccaacatggtgaaaccctcgtctctaccccgggtgtggtggtgcgcgtgcgtagtcccaagctacgcgagaggctgaggcaggagaatggcgtgaacctgggaggtggaggttgcagagatcgcgccactgcactccggcctgcgcaacagagggagactgtctcaaaaaaacaaaagtgcaaaaaaacccctacaaataaacaacaacaaaaaaccctaaaagttcacgagtagagactgcctctattttatggtagtatcttacagtgaaatattttgcaacttcgaaaaaagaatgagatggctaaggataggcacggtttatgaggcgcttcctatgtagtaggcaccattcccagtgctttctatgaatgaactcaggaaatccttgctataacaggagactggtagcatgagtacaattcccattagacagctgaggaaactgaggcccaaggacataaaaccacactctcaaggtcacagccatggggagtggttgagtttggatttgaatccagaatagtctgccttttgtgtcgaccaaagagtcaagatggccaggcgcggtggctcacgcctgtaatcccagccctttgggaggctgaggcgggcagatcacgaggtcaggagatcaagacaagaccatcctggctaacgcggtgaaaccctgtctctactaaaaatgcaaaaaaattagccgcgcgtggtggtacgtgcctgtagtcccagctactcgggaggctgaggcagaagaatctcttgaacccgggaggcggaggttgcagtgagccgcgatcgcaccactgcactccagcctggacgacagagcaagactccgtctcaaaaaaaaaaaaagaaagaaagaaagaaaaaaaagaatcaagatgtgaaccaatgctagtcgcattcggccgggagctcggttcttgagacgcgagtctaccgaagctcccgccagttgagaggcgagtctgccgaagctcccggccgaaaaagccaaatccttccttaacccagtgtctgaggggttttgtccgtggctcctcctgctacaggacatgcgactagcattggtccacatctttggaaccaggcatccagagacatgttgaataggcctcgttgttaggaaccctcagaggtacatggtaaggccagtgccatcaatcatctttttacagacggtgaaactgaggctggtctgaagttgcacagctctgagtggtggatctaatataatattagaaccagatcttgggcactagcatttaaaacactagctgacgctaaagacacagctaatccccttctcctaaatgtgttgcaccatttaaccacttagcagccacaatacttgcagccactcttgcctggatgtgtacaaagccccctcactgggcttcccgcctccccatcactgcttgcaatccaggccccatccagaagctgggggcatcttttaaaaacttaggtccgatctgtctctactcttttgaaaattctccatctcaggctgggcgccgtggctcacgcctttaatccagcactttgggaggctgaggcgggcggatcacctgaggtccggagtttgagaccagcctggtcaacatggcaaaaccccatctctactaaaaaatacaaaaattgccgggcgcggtggctcacgcttgtaatcccagcattttgggaggctgaagcgggtggatcacctgaggtcagaagtttgagaccagcctggccaacatggtgaaaccccgcctctactaaaactacaaaactagcctgtcttggtggcgcatgcctgtaatcccagctactccggaggctcaggcaggagaatcgtttgaatccgggattcagaggttgcagtgagctgagaccgtgccattgcactccagcctgggcaacaagagcgaaactccgtctcaaaaacaaacaaacaaaaaaaagaaacgaacaaaaatataagaattagccgggcatggtgacacatgcctgtaatcccagctactggggaggctgaggcagaagaatcgcttgaactgggaggcggaggttgcagtgagccaagatcgcgccactgccctccaccttgggcgacagagcgagactccgtctcaaataaataaataaatgtgatcttatttaactcataaaggaaccaggcaaatttttaaagagggaacggaggaaaaagagacgggccagagggaaagaaaagatgtgggggcttaggggacgttaaggtctcagcgagcggcctgttcacaattaccggcttattcaggttgtttttctcttgcagagccaggtcgttgggcttcgctggatttttctcctctttctccctggctcagtcccagccgccgcgctcagcccccgggcctcccgcggccccgcccctcgcctcccccttcgcacagtttgtggcctccgcagtccggcggtctccatggcaaccacgggacgcgctcctccgcgcggatcaaaactaagcgggtggggcggaggcggaggcgaggctgcagggagatggtgggggtgggggcgccacggaggacgagggcaggagctcctcttttctgcccctggtgcctcccttaggcctcatccccaaagccagcttccctgaaaagctgtttgtagaaaccaaaaaatgaaaaatcctaaggacacctaggtttcaggaatgctgattaaagaatcgcaagtctgagggctcatgacagtgccttccaagtggtgacctcgcagatgagacgtttgggttttgtagtcataaaagggctttcgttttgtttgtttgttttgttttttgtttgtttttctttttttatttggtgggggagcagggagcggcgcaaggaggataatctaagaaatgaaaatcccaaatgttccatatttttgcaaaaatcgtcaacctccggccgggggcggtgactcatgcctgtaatcccagcactttgggaagccaaggcaggaggatcgcttgagcccaggaattggagaccagcctgggcaacatagcgagactccggtctccacaaaaaatttaaaaattagccgaatattatggtgtgcgcctgtggtctgagctactcgggagactgaggtgggcctatcgcttgagcccgggaggtcagggctgcaggaagcggagatcgcccatctgcacgccagcctgggcaacagagcgagactccatctcaaaaaaaaaaaaaattgccagcccctgaacggttcagctgtgggtgtttttaattgcacagatctctggcaggtgagacccttctccagccatcacagaataaaataataaaaacgagaactgtagcctcacttttgcatttgtttaaaataaatggaaagttggaaaagaatggggaagagaaacaaaacacggctgaaatccctctacccagctacattttgttgccatttaaaaaaaaaatgggacacgcgggccaggggcagtggctcaagcttgtaatccaagcaatttgggaggcctacgcgggcgatcgcctgaagtcaggagttcgagaccagcctggccaatatgatgaaaccccaccgtctctactaaaagtacaaaaattagctgggcacgatggcaggcgcccgtaatctcagctactagggaggctgaggcaggagaatcgcttgaacctgggaggcacaggttgcagtgagctgaggtggtgccactgtactccagcttgggcaacagagtaacaccctgtctcaaaaaaggatacacggtcagaaaaagcaaaagttacagaaaggtaaatttttttcaaaaaaggattcttctccccaaaccccaccttccagcctctccccaaaaagtaaccagttaaatatctctgtatttttccagagaaaaaatgcttgcattagtgtatgtgttaattttattttattttattaatttatttttttttttttgagacggagttttgctcttattgcccaggctagagtgcaatggcgcgatctccgactcaccacaacctccacctcccgcgttcaagcaattctcccgcctcagcctccagagcagctgggattacaggccaacccacccagctaattttgtatttttagtagagacgggatgtctccatgttgatcagggtggtctcgatctcgaacctcaggtgatccacccaccttggcctcccaaagtgctgggattacaggcgtgagccacttcacctggcttttttttttatgttaattttagaatttatctcacagagatttttttcccccatcatcctaaattattttcatcacagcacttaccactttctgtttttgtttttttttttctttgagacagggtctcactctgtcacccaggctgaagtgcagtggcatgatcatggctcactgtaacctcgaaatcctgggctcaagcaatcctcccacctcagccttctgagtgtctggggctacaggtgtgtgccaccatgcctggctatttttaaaaattttttgtagagaggtattctcattatgttgcccagaccggtcttgaactcctggcctcaactgatgctcctgcctctgggtctcaaagtgctgggattacaggcgagaggcaccacgctgggcctatttgtatgtacttatttattgtttcaccctattagaatactatccccatgaggtctgggatatgagtctggtttgttcactgctgaagtctcagcatctagaacacttcaggtaggagctacaaatatttattaactgaatgaatgctgagaattgcactagatttattactataaaatgtgttttcacttaatgtccttctgtatcagtgcttgccagtctgtttttgtttgtcacgacagcttccatctttattccttcaagccaggaacgtgatactgataataattcatttttactgagcacctactttatccttggccctgtgcattttctcattcagtccttagaacccttccttaagcaaatgttattcccatttttcagattaaaaaaaaaaactgagtccaaggaaagtcacacagctaggtagtggcagagccaagctttgaatcactcaggtttattagattccaatctccacacactttttgtttgtttgtttgttgtttgtttgtttgttttgagacagggtcttgctctgtcgcccagtgatacgatttctgctcacttcagcctcgacctcctgggctcaagctatcctcccatctcagcttcccaagtagctgggactacaggcccatgtcaccatgcccagctaattttttgtaaagttggagtttcgccatattttccaggctaatctcgaactcctgggctcaagtgatcctcctacctcagccttccaaagtgctggcattacagatggaagccaccatgcctggccccaatctccacactcagtggggtggatcgcttgagcccaggagttcaagaccagcctgggcaacatagcaaaaccccatctctacaaaaatagtacaaaaaattagctggacgtggtggtgcaagcctgtagtcccatctactcgggaggctgaggtgggaggagcatctgagcataggatgtccaggctgcagtgagccattatcgcaccactacaccccagcctgggtgacagagtgagacgctgtctcaaaaaagtttagaaaaaagaggccaagggctgggcacagtggctcgcgcctgtaatcccagcactttgagaggccgaggcgggcagatcacaaggtcaggagatcgagaccatcctggctaacacagtgaaaccccatctctaccaaaaatacaaaaaattagccggccgcggtgacaggtgcctgtagtcccagctactcgggaggctgaggcaggagaatggcgtgaacccgggaggcggaggttgcagtgagccgagatcgcaccaaggcactccagcctgggagacagagtgagactctgtttcaaaaaaaaaaagaaaagaaaagaaagaaagaaaaagaaaaaggaggccaaggaagataacacagaggcaaaggcgtacagagtggaggaggcgatgtggatgtaaccctgtaggcagaggctggagagatgcagtcagcagccaaggaactcctggagccaccggaagcttgaagaggcaagcaagttcctccgcctggagcctctggaaggagctcagccttgccaacagcttgattttggatttctgtcctccagaaccatgagagaatacatttgtgatgttttaagccatctagtatatggtaatgtgtcacaacagccacaggaaacgaatacagagcccgttgtgtggccacgaattcccctgagtccagtgagggcaattccaaattaaaacatgctaattttattctgtgaccttgtctctcaggaataattatccctgaagcgaaagaattcttgtacagtgtcctgcgccctaggaattacatatgggtgacgggcaccttggaagtggtggggtttttggttttttttttttttagactgagtctcgctgtgttgcccaggctagagtgcagtggccccatcttggctcactacaacttccacctcccgggttcaagcaattctgcctcagcctctggagtacgtgggattataggcatgcgctaccatgcccagttaatttttgtatttttagtagagacgggctttcaccatgttggccaggctggtctcaaactcctgacctcaagtgatccacccactgtggcctcccaaagtgctgggaatacaggcgtgagccactgtgcccaaccactgctctgatttctgtccctatagtgtttttttagttttatgtaaaaggaagtatatagtgtgtgtcctttttggtctgacttctttgactccgcataacgcttctgaggttcaccgatgttgctgtacgcatctgaggttcattccttttttttttttttttttttgagacggagtcttactctgtcaccaaactgtgacaggaggagtgctgtggcacaatcttggctcaccacaacctccgcctccccggttcaagcaattcttctgcctcagcctcccgagtagctgggactacaggcacccgccaccacgcccagctagtttttgtctttttagtagagacagggtttcaccatgttggccaggatggtctcgatctcttgacctcatgatctgcccgcctcagcctcccaaggtgctgggagggcgaccgcgcccggccagtacattcttttttgttgctaggtcatattctgttgcatgaatacattgcagtttgtttattcattcacctgtcgtcggccatcgagttgtttctagtttttggttcttagaaataaagctgctgccgggcgccgtggctcacgcctgtaatcccagcactttgggaggccgagacaggcggatcacgaggtcaggagatcgagaccatcctgactaacacagtgaaaccccgtctctactaaaaatacaaaaaaaattagctgggcgtggtggcgggcgcctgtagtcccagctactagggagactgaggcaggagaatggcgtgaaccctggaggcggagcttgcagtgagctgagatcgcgccactgcactccagcctgggtaacagagtgagactccgtctcaaaaaataaaaaagaaaaaaaaaaaaagaaagcctgaagggcgactgaaagtcagagggaacagcaggtgaagagctgtgtgctctgtgcccacctaggcacatatgcccaccccttccctgttccccccaacttcctgccccatcagccaggggtcccacagcaccagagggcacatgcagctgggatatacgtatatatatgtttttttcctttttgagacggagtcttactctgtcgcccaggctggagtgcagtagcatgatcttggctcactggaacctctgcctcccagctttatgctattctcccacctcagcctcccgagtagctgggattacaggtgcgcaacaccacgcccggctaatttttgtatttttagttgagacggggtttcaccatgttggccaggctggtctcaaactcctagcctcaagtgatccacctgcctcagcctccaaaagtgctgggattacaggcgtgaaccactgcacctggccggaatcacaagttatgtgtcggtcactcagagactcagagactgccttcagaatccctgtttctcaccaaggactgttgggaggaggcctcagggtgctgtctccctggatccaccaagacctcattcctctttgtgctgtgccagccctccatgtggtggagcacgtgggctctggagctaggctgcctgggttcaaattctggctctatcaccctgtggctgtgtgatcttgggtcagttccttcacctctctgagccttggcttccttctctgcaaaatggcagttgtaatgagacttaacctcatggagaggttgtgagcagttcacgagaccatgataggtattggcacagaacccagggatggtaaatgctcacagttattagaaaaggcagagtgggccaggcatggtggctcatgcctgtaatcccagcactttgggaggccaaggcgggcagatcacaaggtcaggagatcgagaccatcctggctaacatggtgacaccctgactctactaaaaatacaaaaaattagccgggcgtagtggcacgcgcctttagtcccagctacttgggaggctgaggcaggagaatcacttgaacctaggaggcggaggttgcagtgagccaagatcgcaccacaacactccagcctgggccacagagcgagactccatctcaaaaaaaaaaaaaaaaaaaaaagcagtgtggtctagctgtttgtagactcagttccggttcacatcctggctctgtttacaaatcgtgtggctctgtgcctcagtttccaaatctggagaatgagattgtatcagtctcatggtgttgagtcttatgaggattaaattgtttgtgtaaaatgcttagaatagtgcctggtagatatgattattcaatatgcacgaagattattctctgctctaagcccccacttagaaccagagcgtgtactgcagtttcaaacaggccctcagagtgccacccacctctggcttgtttctcaaggaatcctgaagaatttcttctgcccagccgtttaccagagaaatcatgctctatgactccgatgtcagctggggcctcccagactgagagagacccgaatcagtgtgaggagcacagaatgtggtcagaggcctgttttcaattcctgttgtgctttgctctgtagccttagacaagttacttagcctttctgagctttactttcttcatccatagaatgagatgatgatcttaataatagtacagtttgataatctaatctcttatctggtcttttttttttttttgagatgtaggggggtatcactctgtcatccaggctggagtgcagtggtgcaatcacagttcactgcagccttgatctgctggcctcaagcgatccttccacctcagcctccagagtagctgggactacaggtgcatgccaccgtgcctaatttttttttttttttttttagtttttgtagagataggggtcttgctgtgttgaccaggctggttttgaactcctggcctcaagcaattctcccaccttggcctcccaaagtactgggattacaggcgtgacccactgcacctagcccactacagaagtattgatgggattataagggcttcccgcatccccctgggaagtaaattctacaatataaggtatagtcactgtatcatttttctaaaatccaaaactctgaaccacatatacccctgaaaccacacctggctgagggtttttataagggattgtggacctatagggccataactcacagggttggcaggatatgatgggttaatgatatgaaggaatgtggcatagtgcctggaacacaagatagctgttactgtttttgtttcagttaaattgtttcacctttcacaccagccactggaaaatgacctgacatcctgagaagtccgtaggataaaagaaagctgtgtttccgccgggcgcggtggctcacacctgtaatcccagcactttgggaggcagaggcgggcagattacgaggtcaggagatcgagactatcctggctaacacggtgaaaccccgactctactaaaaatacaaaaaaattagccaggtgtggtggcaggtgcctgtagtcccagctacttgggaggctgaggcaggagaatagtgtgaacccgggaggcggagcttgcagtgagtcaagatcacgccactgcactccagcatgggcaacagagagagactctgtctcaaaaataaataagtacataaaaataaaaataaatgcagtcctggaagacttcaggccatggaagcagttttcagtacttgttttagcagccacatcatttttccaaattaaatcttacatggatttccccccatatgtcaaggggcagactatgatttcattagcatacatttattttatgagttcatatttgtacaaaagagcatctcaatcacaaagaacaatgaagagttttagctgaacccccttttgaaatcaggggtttacagaagccagatgcagccctccaacagctggcacattcaatttacttgtgaatttttgcttgggatttgccctaccagtgatgttttcactcagctaagtagcttcaaatggtgacagttttgcatgacaacttgcattggagtcccaggatacactttggtccagaaaatcttgaaagagaagtggtaggattttgatttcatgggcaacattgaacaaccacgcatgttgtgtatcacaaatataaatgttatacccctgaaatccacaataagcacaaaatacagtcttcatgctgcaatatgataagaaatgtcacactatcccttattatacaacgattatgccttgatgggagagcagcatgcaacaaacacgctggaggctttcgtagcatttattcaagctcagactctgggatgcaataacgaacacagtagtacaatattctgcgagtgggtatgcccaggctgggcatttacaaggaatagaaaaatcaggccgggcgtggtggctcacgcctgtaatcccaacactttgggaggccgaagtgggcggatcacaaggtcaggagattgagaccatcctggctaatacggtgaaaccctgtctctactaaaaatacaaaaattagctgggcgtggtggtgcgcacctgtagtcccagatactcaggaggctgaggcaggagaatcacttgaacccaggaagcagaggttgcagtgagccaagatcgtgccactgcactccagcctgggctacagaaggagactccacctcaaaaaaaaaaaaaaaaaaaaaaaaagaatcaacagagaagctgggcgcagtggcttacacctgcaatcccagcactttgggagaccaaggcgggagattgagaccatcctggccaacatggtgaaaccctttctctagtaaaaatacaaaatttagctggacgtggtggttcatgcctgtaatcctagctactagggaggctgaggcaggagaatcgcttggaccagggagtcagaggttgcagtgagctgagattgcacctctgcactccagcctggtgacagagcgagactctgtctcaaaaaaaaaagacgttaggagtctctgacattacaatttggtaggctgagtctttgtgttgtgtgtaagttacatttttgaaaagagattcagtcaaacctttgcagatccttgaactaacaagtttgcaaattgacaggtccgttgtctctgagcaaaagatctgcctactcacatgtatttggattttacctgatttttaaaattcttcttcacctcagtgttaacgtcgttcattggtaactcttgaaaatggcctcttaatgatttacctccttttggaccattgcccagaagccttgcctcttctttagagagtggagttcactcctcctcaccaagccagagcttctggaatttaacttggggagactcacaccctcaccccaggcgccaatcggggcagaagggtcccgcttctgaccacttctgtaagagagactcagcgtgtagagaaagacgacagcttttcaagagccgcttacagatcagtgagttcctcagaggtggggagcaggcaactcactctcagccatggtttctgcttgacatgcgcaaaacagggtggcccactccgaacaagtttgtgccagaggtacattcaaggtacatgcttttgaaacacagaaaacggctctagactttgcaataacaggatttccaggagggcgcaaagctagaggggtccgtgccgcccgcctccccccagcaagagaggctgtccccagaatcaggccgtgggtgacagccgaaggaggatggcggcccttctcccgagtagggatctccctgacacgttcctcctgggtctgcgtgagttttcttcaactccagtaagagatctgcaaaaccttggaatccaggaccgtttccacctcctccattttctgcaaagggcgcaggcgcctggggtcagcctgtggtctccatagcaacggtcggacgcgctgctaggttctggctctgactgcgcctgcgcggctggtcccgcggggtctcccgagtagcggaagatatttgtgggtctttgagacccttcctcgcttagaaattactctcatctactcaaatgatacccatacacatattcaggtgttacccgcacactctcaaatattacccacaactactttcaattatacgcggatgccacccacacactctaatgctacccacactcactaacgtgtattcaagtaacccaaatgttacccgcacctactcaaatagctactatgagagtcacgggcaaggttttggtctgtttattccccttctgtatccccagtgcctggcacactgtaggtcctcaggaaattttgttggttgcatggatacatggatgaatgagcaatccacactcaaccagattttatgatcattcagctgttacccacatgtactcaaatgctacctacgctcactctgatgtctccaagtaattcaaatattacccacttactctgagtgccatgaaggcagggatttttattgagtttactcccttccatatccccagctcctggaacatagtaggtatgcaataaatatctgtaagatgaataaatgagccacgggcacccagacgttaaccacacccactcagatgtaacccacaagttagttaactcagataaagatatccacctctttcgcactagtcagatgttacctgtgctatccaaatgatacccattcttactccaaagttacccactcactagagtcattcccaccctcccttgcattacccacactcactcgcactccttaaacgtagtgaggtggtacctaccctcccacagtcatcacccacaccccctcagacactccccacgcccacccgatgccaccacctcacagcttcttgtctgaggcgtgatgccgccggcggtttttcttgttcttccttttgcccctcttgccaactccagccttgctctccttctcggaggagtccagaggtggcaccacgtccatctggacggtggccccagcctccggtttctcccccagcccaggcacagagcactttcttgcaggcagctctctggggcccgtggctgggggacacagttcctgcctcaggacccgggccatatcctccaccgtcctgccctcgctctgcagaaagaggttcagcttggtcaggaattcaatgtcctgcttccggggcatgtagaccactctccacacaccgcccttgcccttgatctccctggggaccacggcgtaattgatgtcctccgtcagctgaatgatggccgccttggatttatcttcttccagataggccttcccagccacttcgaacttgcctagaggtttgaggggcagccgaataatctcttcgaattcctcgtggttgcagtcctccgggatccccaggatcatcagggacttgtaactgtccacctccagggccttgcacccgtgctccaacagtgcaatgtccttcaccccgaacagcatcttgcccaactctttgaggcagcagtatgcccgctggtggacacctgagctgcctcgggaatccacgaaattatccaggatgccgcgattccttcccaaaggctacgagagagtgaggcctcaggggccggaggccgctcccaggaccccttcgtccagctcagtgaaggatgcccccagcccctgcctgcagggctgtgcaacgtcggggcttctgtggctccctctgagtgggctcgaagattcccagggacttacgcgtgctggagaagcagaaggcggtgtttgccacctgactcgtggctcccgggtcctgggcaaggctgcaccaaggagggtctaaagatgatgcttcccctttcttggcgtggcctccgaaggtctcacaggccccaacggtctctccggatctgggactgctgatctccctgggacaactgccaacagagtgtcgtaggcgcggccctggcaggcagggaggcgcgtccctcaccgctggcccagaggttgcactcagtgccctgtcgccggactaggacgaggatgtggccgctgcacttgctcccgcggtgacgtcaccgcctccttccgctctgcggcctggcggtctccatggcaaccgctgaagcatccatctcctctgccattggccgactggccgcattgaaatcaagagtctgagggggtcattcggaggtgaggggtcggccaccagccctcagaagcgcccgcgattctcctttgaataatagccgattccaggggtgaggggacagcgaatgtacaagaggcacccggggcatcttttggggtcagaaagtaaggaagtgattaaaaaaaaaaaatgagaacacctggaaagacagaggaaccagcctgaaatgctcccactggccaaccctgggacaatttgagcatcaacgttaaaaatgaaagtaacagattataaccccttgaataaaattagaatctatgagttgatgtagatataagcacgtgaatgcaaagtttggtgaagaatgtgaactatcaaagtacctgcccatataatactcatcaaagggaacaaatgtatctttacagtggaatgttcttgcatgtaggacacacacacacacacacacacacactataatattcagagcgatatgacaatttagactcaaaatgcttcagaggataaaacattcttttttttttttttttttttttgagatgaagtctccctctgttgcccaggctagagtgcagtggcccgatcttggctcattgcaacctctgcctccccagttcaagcgattctcctgcctcagcttcccaagtagctgggattacaggcatgtgccaccaagctcagctaatttttgtatttttagtagagatgtagtttcaccatgtcggccaggctggtcttgaactcccaacctcaggtgatccatccacttcggcctcccaaaatgctaggattacaggccacagccattgcacctggccgcgaaaacattctttatactatatttgcaactcttctgtaggtttatggttgtttcaaataaatgtttaaaaataaataagaaatgtctcccccatgtgatgacatccacaatgtctattcctctcctccccagtccccattaataaagccaaaacatttgggttaggtcgacaccctttatacccccagttccagggataagccctgattggcttgaaccaattagcataatctcaccctccttcccacagtgattggttcagaaatggtcacccaggtaacctggacaaaaagcaattagtgcttaatatgcccctcttctctgagattggttaaaggttagacacgtgaactcagtaagtccagtcagaatgaaggtaaggatttctgcaactggtaagcggaggaagactctctctttcctcctagacgtgaaagactaagtataggagctacaggaggctgtcttggaagcatgacaaactctcttccttccttccttccttccttccttccttccttccttccttccttcttttttctttctttccttctttctttcagacagagtcttgctctgtcgcccaggctggagtgcagtggcgcgatctcgactcactgcaacctcaacctctcaggttcaagcaattctcctgccccagcctgtaaaacagctgagattacaggcgcccgccaccacgcccggctaactttttgtgtttttagtagagacagggtttcaccatgttgtccaggctggtctcaaactcctgacctcaagtgatccacctgccccggcctcccaaagtgctgggcttacaggcatgaaccaccgcgtccagccaataaacactttgaggatgaactttgcatctagaggaaggcagagttgagggaacaaccagaaaccaggccatagtcaggaagacatcatatgcctcaggatcaaacaacacctgaaaccgacatcccctgaaactttgtttttacacgtagtcagaagtgcacgaattataaatgaaaatccattaactgaacacatggtgtaaccagcacccaaatcagtaaatgaacatcatagcattcccagaggatatcctgtgctttctccaaatcactatatcctcttaagggaagccactatcttgactttcaacagcataggttagttttgcctgtttttgtattttacataaatggaatcacatattacgtggtctatgtttcttggtgaacatatatgtacatatccattagttttaagcctgaacaaatgccttagcagattctacaagtttcccaaactggtcgtaccattttattctcccaccaaacagtgtaaaaaaaaaaaatccagtttcgccacatgctcatcaatactagatttttttttttcctgagatggagttttgctcttgttgcccaggctagagtacaatggcacgatctcggctcactgcaagctccgcctcccgggttcacgccattcttctgcctcagcctcccgagtagctgggactacaggcgcccaccactaggcccggctaatttttttgtatttttagtagagacggggttttaccgtgttagccaggatggtctcgatctcctgacctcgtgatctgcacgtcttggcctctcaaagtgctgggattacaggcgtgagccaccgcgcccggcctgatgcctccggttttatagtcaggaaaaccgaagatcagagaggttaattcacttacctaaggtcacacagctagtgaatggcaaagctagacttcccgcctcagcaccctgactcctgggcgcacagatttaacattatacaataccatggagttccctgagaaaggggtcccatattgtgtcacgcggcttagttcctgttctgtcgtgaagtttctggatgacagttccctctctgggctgtatgttgattttgttcagtgccagtttagctaagctgggcttgtgtgtcctagaatagctttctgcaggtggctgttggttagagtcgtctaaaagagaaatgtgcattagatttacacagcggctggtgctgtgagaaggtctgcacagggtgccacatggctcatgcatttcatgactggtctgtgggctcaccttattggcttggggcagcctctgggactccacctgctcctgccggtctccttttcagcgtcggtgaacttggggccagcaccggagcagctctgtgggggcaaaaggcaccagcttcccctgcaggtcaagcgtggaattgaggttgaaggtgggaaaagagacgttggttgggggcgggggttccagtttgtcttcaaggattctaatttttttttttttttttttttttttttgagacggaatctcgctctgttgctcaggctggaatgcaatggtgccatctctgctcactgcaacctccacctcccgggttcaagcgattctccggcctcagcctcctgagtagctgggattacaggcacccgccatcatgcccagctaatttttgtattttcatagagatggggtttcaccatgttggccaggctggtctcgaactcctgacttcaaatgatccgcctgcctcaatctccaaaaatgctgggattgcaggagtgagccaccgcacctggcctagattgttcttgtaggttccaatttgtcctctctgtcccggttcagtttctaaattgcccagcagactggcctacagagacttaaaacccaatactagtcacagaaaaaaaaactttgatacacccctcctccagcaaccctagcgctccctggttagtaattttttttttttttttttttttttggagataagggtctctctatgttgcccaggctggtatcaaactcctgagttcaagtgattctcccacctcggcctcccaaagtgttgggattacaggcctgagccaccacgcccagcctcagtaacttttaaacaagatctcgccatccctatattattattattattttgccatcacgaatatagtttatttttaaatttttaatttttaattgtgcgggtacatggtagctgtatatatgtatggggttcacaagatatttgatacaggcatgcaatgagaaataatcacattgtggagaatgaagtcgccatccccttaagaacttatcctttgtgtgacaaacaatccaattacattcatttagctattttgaaatgtactattattattaacaatagtcatcctgttgtgctatcaaatagtatgtcttattcattctttctatttgtgttgagtattgtacccattaaccatccccacctcccccatccatcccgccgacgacccttcccagcctctggtaaccttctgtctatatgttaaaaaaaaaaaaaaaactgctttttttgttttgttttgtttcgagatggagtctcactctgtcgcccaggctggagtgtaatggtgcgatcttggctcactgcaacctctgcctcccaggttcaagtgattctcatgcctcagcctccctagcagctgagattacaggcacgcgccaccacgcctggctaatttttgtattagtagagatggggtttcaccatgtcagccaggctggtctggaactcctgacctcaagtgatccacccgcctcggcctcccagagtgctgggattacaggcgtgagccaacatgcctgtcctcgttcaattgttttgattattttaattcccacaaataaatgagaacatgccgtttgtctttctgtgcctggcttatttcacttaacataatgacctccagttccatccacgtttttgcaaatggcaggatctcattctttttcatggctgaatagtactccattgtgtataagcaccacattttctgtatccattcttctgttgatggacactcaggttgtttccaaatcttcactgtcgtggacagtgctgcaaaaaatatgggagtgcagagatctccttaatctactgatttcctttcttttgggtatatacccagcagtgggatggcaggatcaatttttagcttaatttttagttttgaggaacctccaatttacattcccaccaacagagtatgagggttcccttttctccaccagcatttgttctttgctgtcttttggatataagcttttttttttttttttgagacggagtttcactcttgttgcccaggctggagtgcaatggtgcaatctcggctcactgcaacctccgcctctcaggttcaagcaattctcctgcctcagcctcatgagtagctgggattacaggcatgctccaccacgcctggctaattttttgtatttttggtagagacagcgtttctccatgttggtcaggctggtcgtgaactcccgaccccaggtgatctgcccgcctcagcctcccaaagtgctgggattacaggcgtgagcaattgcatctggccagatataagctattttaactggggtgagatggatatctttatcttattttagttttgaccaccatccctttctgggtcctcacctccccagattcacccccaattgtctaagatccaatcacataatgtttcttatcccacgtggctcatagcagacctccttctgcttaacacggaccaatcctgaacaaccatgactcttcctttataaacatcagttgcactaacatactacttttcaggttttccagtagagagaaaacaagggaagtgtgccctctcatttaggggttttaggaaccagctcttccacagagatttcttttaagtctaattttgtcataaaaaattttgcattcgagccgggcgtggtgactcacacctgtaatcccagcactttgggaggctgaggcgggtggattacctgaggtcaggagttcgagaccagcctggccaacatgacaaaaccccatctctggtaaaaatacaaaaattagccgggtgtgttggcacacaccagtaatcccagctacttgggagactgaggcaggagaatcacttgaacctggcaggtggagattgcagtgagccaagattgcgccactgcactccagcctgggtgacagagtgagactctgtctcaaaaaaaaaaaaaaaaaaaaaattcacattcgactccatgacatgaccattttaatacaaagatgagttttccttccaaagatgaagtaaaattgttgatccaaaatatttgccacgagtttatgaatccttgacacgccattgcatatccctgggcttatgcatgttcccaattgagaagcaagggaagagaatggttcatttatttgatccaccaggatttactgagaagtgtccttgttctaggcttgggtaacgtgctgggcatacttgagtgagggagacaggctctgctttgaggagctcagtccagtggttacgacaggctggctcagtctgtttacaggcagggagagaagccctataattactacgatgtgttccgatcctggtgtggggtgtagaatacagaatatatcaagtgggcttagttttcctggaacatgttttgctagagtttaaagagagaaccgcataaagtcctttggcggccctgagatacctgactgacataattactgtatcagtaacctttttattaattcactcttcaacgtctctgattaattctccataaaggaattcatctgtctggtctcatctgggaaggcttcccgcaggaggtgacatttgagagaaatcttgatggatgcatataataaccacaaataatactattttaaaaagtaataactgctaacttttgcatagggcatactaaaatattctaagccttctatgtgtactaagtcatctaatttttacaacagtccatgagttagatgttttattgattcaatcatttattcattcaacaagtatttattgaatagttcctgtatcttatagtcaggaaaactgaggaccagagaggttaaatcacttacctggggccacacagctagtgagattttttttttttgagatagggtcttgctctgttgcccaggccggaatgcagtggcgcaatcatggctcactgcagcctcaacctcccaggctcaagcaatcttcccacctcagcctcctgagtaaccgagactataggcgcatgccaccacacctagctaacttaatttttttttttttttttttttgtagagacagagtctcactatgttgcccaggctggtctcaaactcctgagctcaagcaatcctcctggctcagtctcccaaagtgctgggattacaggtatgagccattatgcctggccaaatgagttttgttttttttttttggggggacgaactctcgctctgtggcccagcctggagtgcagtggcgcgatcttggctcactgcaacttccgcctcccgggttcactccattctcctgcctcagcctcccgagtagcggggactacaggtgcccgccaccacgcctggctaattttttgtattttttttagtagagacggggtttcaccacgttagccaggacggtctcgatctcctaacctcgtgatccgcccgcctcagcctcccaaagtgctgggattacaggcgtgagccaccgcgcctggccttttttttttttttttttttttttttttttttgagacggagcctcgctctgtcacccaggctggagtgcaatggcgggatctcagctcactgcaacatccgcctcccaggttcaagtgattctcctgcctcagcctcccgagtagctggaattacaggtccccaccattacgcccagctaatttttgtatttttggtagagaggggggtttctccatgttggccaggctgatctcgaactcctgagcttaggtgatctgcccacctcgacctcccaaagtgctgggattacaggcatgagctaccacgcctggccgagatttttacaatttgatttagcttaatttttttccatgaattttctgtttgtatcttttacccatttttattaaaaaatggggtttccttttttgctgaagagtaaaaaagctttacagataaaggaaattagcatattatcacaccacatgtaatagcttagttacttgttttttgttggtggctttttttttttttgagatgcagtctcattctgtcacccaggctacagtgcagtggccgatctcagctcactgcaagctccgcctctcaggttcatgccattctcctgcctcagcctcccaagtagctgggactacaggcgcctgccaccacgcctggctaattttttgtatttttagtagagacggggtttcaccatgttagccaaggtggtctcgatctcctgacctcttgatctgcctgcctcagcctcccaaagtgctgggatcacaggcgtgagccaccgcgcctggacgatggagtttttttttttttttaaataatctatatatatatatttattattattattttatttttgagatggaatctcactttattgcccaggctggagggcagtggtgtgatctcggctcaatgcaacctccgcttcccaggttcaagcgattctcctgcctcagtctcctgagtagatggtattacaggcgtgagccaccacgcctggctattttcttcgtatttttagtagagtcaaggtttcactatgttggccaggctggtcttgaactcctgacctcaagtgatccacttgcctcagcctcccaaagtgctgggattgcaggcgtgacccaccgcgcccggccttggctaagttacttgttggttagagtctaggttctggggatagagcaatgaatgagatggacaaaatcccctgatttccaaaagctgacactgtattgggccgacagagcagggacaaataaataagatatataatatgtcatgtggtgatcaggattggttacggggaaaaataaagcaggaaagacagagaagggccaggactcacgcctgtaatcccgccactttaggaggccaaggcaggaggactacttgagcccaggagtttgagaccagcctgggcaacaaagtgagaccccaggctgcagtgagctatgatgataccactgcactccagcctgggagacagagtgagatcccatctcaaaagaaaaaattaaattaaaaagacagacagagggccgggcatggtggctcacgcctgtaatcccagcactttgagaggccgaggtgggcggatcacgagatcaagagatggagaccatcctggctaacacagtgaaaccccgtctccactaaaaatacaaaaaattagccgggcatggtggcgggcgcctgaagtcccagctactcgggaggctgaggcaggagaatggcgtgaacccgggaggcggagcttgcagtgagccgagatcgcgccactgcactccagcctgggcaacagagcgagactctgtctcaaaaaaaaaaaaaaaaaaagagagagacagagcgagagagacaggcatagagagtgtgtattgggagaggatgttataatttacagtgtgccaagtaaaggtttcatggaggtgacatttggagcaaagacctgaaggaggtgagagagccaccttgtgaacatgtgagggaactgtgttccaagcagaaggaacagtcagtgcggccgggcacggcggctcacgcctgtaatcccagcactttgggaggccaaggcgggtggattgcctgagctcaggagttcaagactagctgggcaacatggtgaaatcctgtctctactaaaatacaaaaaattagccgggcgtggtggcgggcgcttgtagtcccagctactcgggaggctgaggcaggagaatggcttgaacctgggaggcggagcttgcagtgagccgagatcccgccactgcactccagcctgggtgacagagcgagacttcttctcaaaaaaaaaagaaaaaaaaaaagtcagtgcaaaggccctgaggctggagcctgcctggtgtacttgaagaacagcagaaacccgtggtgcctggcagcagagggagcaagggagtgttgagaagaaagcccaagaaaaagcaggccgcgcaagagaggaggtgacagccagatcttacaagacctcaaagctcctggtggggacttgggacttttctctgggtgagatggaacacccaaggtggggaggtttgatgaggtaactgagggcgttataggagtttgccagtcaggaatgatgttggagtaggaggatgtaggtttctgagagttgaaaaggaacaattaatccttcacacagcaaatgtatatatttatacatttaactctggctctgttccaaaccttgtgttaacagtgagcccaatagctattaatacaaatagaatgtaatgccaggaatttagccactcataacttacatgagttatgaacttttttttctttttgagacagggtctctctctgtcacccaggctggagtgcagtggcgtcatcctggctcactgcaatctctgcctcccgggttcaagccattctcctgcctcagcctcccaagtagctgggattacaggagcacaccaccacacccagctaatttttgtatttttagtagagatgggggtctcaacatgttgcccaggctggtcacgaactcctgacctcaggtgatacacttgcctcggcctctcaaagtgctgggattacaggcgtgagccaccacgccctgcctgaggtgtcgtttttgacatttaaatctgcaatctaggctgaggatggtggcgcacgcctgtaatcccagctacttgggaggctgaggcaggagaatcgcctccacccaggaggtggaggttgcagtgagccgagatgatgccactgcactccagcctaagtgacagagtaagactctctctcaaaaaaaattaaaaaaaaaaaaaataaataaataataaatctccaatctacctctaactttatacctttccagatggctattgagtgtcttagttttatggagaaaagtccatctcgttttcaatgatatgaaattccactgttaaaatgtaaattcccagctgggtatggtggctcatgcctgtaatcccagcactttgggaggccaaggcgggtggattgcctgagctcaggagttcaagactagctgggcaacatggtgaaatcctgtctctactaaaatacaaaaaattagccgggcgtggtggcgggcgcttgtagtcccagctactcgggaggctgaggcaggagaatggcttgaacctgggaggcggagcttgcagtgagccgagatcccgccactgcactccagcctgggtgacagagcgagacttcttctcaaaaaaaaaagaaaaaaaaaaagtcagtgcaaaggccctgaggctggagcctgcctggtgtacttgaagaacagcagaaacccgtggtgcctggcagcagagggagcaagggagtgttgagaagaaagcccaagaaaaagcaggccgcgcaagagaggaggtgacagccagatcttacaagacctcaaagctcctggtggggacttgggacttttctctgggtgagatggaacacccaaggtggggaggtttgatgaggtaactgagggcgttataggagtttgccagtcaggaatgatgttggagtaggaggatgtaggtttctgagagttgaaaaggaacaattaatccttcacacagcaaatgtatatatttatacatttaactctggctctgttccaaaccttgtgttaacagtgagcccaatagctattaatacaaatagaatgtaatgccaggaatttagccactcataacttacatgagttatgaacttttttttctttttgagacagggtctctctctgtcacccaggctggagtgcagtggcgtcatcctggctcactgcaatctctgcctcccgggttcaagccattctcctgcctcagcctcccaagtagctgggattacaggagcacaccaccacacccagctaatttttgtatttttagtagagatgggggtctcaacatgttgcccaggctggtcacgaactcctgacctcaggtgatacacttgcctcggcctctcaaagtgctgggattacaggcgtgagccaccacgccctgcctgaggtgtcgtttttgacatttaaatctgcaatctaggctggggatggtggcgcacgcctgtaatcccagctacttgggaggctgaggcaggagaatcgcctccacccaggaggtggaggttgcagtgagccgagatgatgccactgcactccagcctaagtgacagagtaagactctctctcaaaaaaaattaaaaaataaataaataaataaataataaatctccaatctacctctaactttatacctttccagatggctattgagtgtcttagttttatggagaaaagtccatctcgttttcaatgatatgaaattccactgttaagatgtaaattcccagctgggtatggtggctcatgcctgtaatcccagcactttgggaggccaaggtgggcggatcacgaggtcaggagatcgagaccaccctggctaacacagtgaaaccccatctctactaaaaatacataaaattagccaggtgtggtggcgtgtgcctgtaatcccagctactcgggaggctgaggcaggagaatagcttgaatccgggaggcagaggtttcagtgacccaagatcgcgccactgcactccagcctgggtgacaaaccgagactccatctcagataaaaaaaaaaaaaaaagatgtaaattcccatatgtatttctggcccctctaatctgtcccttttaaccagttgtctgtccttttatgggccagtcccaaactgtttgaaaactatacttttatgatcagttttcaaatgcagaagggctgatttcctcttacattttcagaaatgttctgcatcttttcacatttttttcttttgaacctcagaatcaacctgcctaactttaaaagagccttttagtgttttaaataaggctagattaaattcatagactcggggggaaaccaggttcaactttttaatactggatcttcccaaatattcaaatcttgtatgctcagccctagcagcagtttcaagttttttgaactagatcctgtgccatttttgataagctcattccaagatatttttattatcttttaattcttgcttgagtaaatgcaatgttcttttcttctgcttgttttctaagccagttttctgtatactggcacttgtttaggttgaagatattaattttgcaaccctagagcccccttgctcaattctcatttcttccaatagtttatgggttctctttcaagatatacagtcacattgaggcaggagaatagggcctggaggcagggaacctaaggctgattcaccctgacttctagaactacatcgaaagaaaaacctcaaccttccacgcttaagtaacgaaaggaccaggggagactcctgcaaaccccaaccttttctgtggggcagatgggaaatcgaaggtacccctgattggttgcagaaagcatagaagtgtaacttcctaacttcacttcagcctctgattggttgctgtccacaaccactgtccacaaccaatcagactgattgcaggcgaggtctttgtttgcatagaagtgcaactttgtaacttcactttagcctctgattggtcgctttttgcttgcagaccaccacttcatttacatggggtgaacaccaagtggccaatgggagggccaggtgcagtggctcacacctgtaatcccagcactttaggaggccaaggccagcagatcacctgaggtcaggagtttgagaccagtctggccaacatggtgaaaccccgtctctactaaaaaatatacaaaaattagccaggcatggtgacagacacctgtaatcccagctactcaggaggctgaggcaggagaatctcttgaacccaggatgcggaggttgcagtgagccaagatcgcaccattgcactccagcctgggtgacaagagtgagactccatctcaaaataaataaataaataaaaataagtgaccaatgggaaacctataggaggtatttggacctaagaagatcctgtatccggggcccttgagcagctgctggggcctgctcccacactgtggtgtgtactttcacttttgataaatctctgctttccttgctttgctgtgcgttttgtccaattctttgttcaaaacaccaagaacctagacaacttgcagtcaagaccctctatcggtaacaacatcatctctgaagaatagacatgcttccttctttctaaggttcatactcttcttccttttccctatataattacatgagtcatgttccttgaatctgagcccagcactcaaggtttttgcttcctggcacagggcctggggcctctgtccatccttgaaattctttgcctatcattttctgctccaaaacggttatacccaaaggtgctttaccatgacttctcaggcacggaggcatcactccattgggagccatttcggcaggaagcttctctgactgtcccaagtcctcattccaataaacataaaaacaacaatcatattataggcattgacatgcattctgaagaaccttatattttgctcaatagcatgtttgttttttgttgttcttttgttttttttttttttttttgagacgaagtctcgctctgtcgcccaggctggaatgcagtggcaagatctcggctcactgcaagctccgcctcctgggttctggccattctcctgcctcagcctcccaaatagctgagactacaggcacccaccaccatgcccagctaattttttgtatttttagtagagacagggtttcactgtgttagccaggatggtctcaatctcctgacctcgtgatctgcccacctcggcctcccaaagtgctgggattacaggtgagagccaccgcgcccagcctgttttttgtttttgagacggagcctcgctctattgcacaggctggagtgcagcggcgtgatctcagctcactgcaacctctgcctcccaggttcaagcgattcttctgcctcagcctccccagtagctgggattacaggtgtgtgccaccacacctggctaatttttgtatttgtagtagacacggggtttcaccatgctggccaggctggtctcaaaactcttgacctcaagtaatctgcccacttcggcctcccaaaatactgggattacaggcgtgagccactgtgcctggtcagtagcatgttagaattaaatgagccttttgggaaaattcaggtgagggtaggttacccaaagactatgcagccacgttcaaacctttggtggtttatgtatttatttagagacagggtctcactcctgtcacccaggctggagtgctgtggcatgatcatggctcagtgcagcctcgacctcctaggcttgggtgattctcgtggccacctcagccttgtgagtggctgggactacagagacacaccacctcacccagctaatttttttttttgtatatttgtatttttagtagagacagggttttgccatgtcgcccaggctgatctcaaactccttggctcaagcgatcttcctgcctcagccttccaaagtgttgggattacaggcatgaaccaccacactcagccctttggtgttttttttgtttgtttgtttgtttgagatggagtctcgctctgtcacccaggctggagtgcagtggcgccatctccggctcactgcaagctccacctcccgggttcacaccattctcctgcctcagcctcccgagtagctgggactacaggtgcccgccaccacgcccggctaattttttttttgtagttttagtagagacggagtttcaccgtgttagcggggatggtctcaatctcctgacctcatgatctgcccacctcggcctcccaaagtgctgggattacaggcgtgagccacctctcctggtccttaatttttaaagtttttgtagagacggggtcccaccatgttgccccagctggtcttgaactcctgggctcaagtgatcctcctgccttggcctcccaaagtgctggaattacaaagtgctggtgacgtgaaccaccttgcccagctgtgtacactctaaatggttcattttatattatttctaaatggttcattttatattatgtgaatttcacctcaatacaaaacttttttttttttcagacggagtttccctcttgttgcccaggctggggtgcaatggcacgatctcggctcactgcaacctacgccaccccaggttcaagcgattctcctgcctcagcctcccgagtagctgggattacaggcacgcaccaccatgcccggctaattttgtgtttttagtagagatggggtttcaccatgttggtcatgctggtctcaaactcccgaccccaggtgatccacctgtctcagcctcccaaagtgctgggattacaggcgtgagccaccgcgcccggcttttttgttgttgttgttttttgttttttttaattgactcagctttgggcttgaactgttagaatgatggtgcgtccattcagtgagatgaggaagctctagggaaaatgaacttgggagtggggaatcccattttgaatgtcttaaatttgatatgccttgtaggcttccaagccgagttagatatatgagcctggagttcagagatggggtggagataaaaatttagaagccattggcacacgggaaatatcttaagccatggagctagatgagctcatttaggccagaggtgtccaatcttttggcttccctgggccacactggaagaagaattgtcttgggcaacacataaaatacgctaacactaacaatagctgatgagctaaaaaaaaaaaaaaatcgcaaaaaaaaaaaatctcattttttgttgttgttgttgttttttgttttcgagacggagtttcgctcttgttgcccaggctggagtgcaatggcccagtctcggctcactgcaacctccacctctgggttcaagtgattctccttcctcagcctcccaagtagctgggattataggcatgcaccaccacacccggctaattttgtatttttagtagaaacagggtttctccatgttggtcaggctggtctcgaactcccgacctcaggtgatccgctcgcctcagcctccgaaagtgctgggattataggcgttgccaccgcacccggccaaaatctcataatgttctaagaaagtttacgaatttgtgttgggccaccttcagagccatcctgggccgcatgcagcccacgggccgcaagttggagaagcttgatctagggaaagggtgtggggaaagacgaagagatggcccaagcccatgcctctggcagtcccagcgtgtcagtgtcagacagcagacaaagaatccaggagacagcagaagagggctggggggaagcccaagagtgagtgtttggaaaactaaagagagtaacagcaatcggttggaattggagtgtatccatttatagaggactatgcttagtggtacacaaacataaattgtggcgcatccgtgtagtagaatactatgcatggttacacgaaataaggaggaagttctctatgtgctgagatgggaagatttcctttgtatgaaatgatttgctgacatcctcacaaaacactgtttaataaagcaaggtgtataacactgtaaaaaaaaataaagagagagagaaaaattccttttttttttttccttttcgagacagggtctcactctgtcacccaggctggagtgcagtggtgcaatcatggctcactgcagcctcccaggctccagcgatcctcctgcctcagcctcccaagtagctggaattacaggcacccgccaccacgcccggttaatttttgtatttttagtagagacaggttttcaccatattagccaggctggatctcgaactcctggcctcaagtgatccacccgcctcggcctcccaaagtgctgggattacaggcgtcagccaccgtgcctggccacaggactggctttcaatatgaagcacagaaacgtcctccaaggggcaggagagaaggacaagggcacacacgtccagcaaatgcagatttcctggtaagaagctgaagaaacaaattttattatttaacaaaaatgtagatgatgcttactatatgcctgaccctgttccaagcactttgcaaatacttcatttgcatgaaaagcctttgaggtagctactgttatattctgtcatcctcatcttacaaatgaggaagcaggcacagagggcaatcaccttccccaaagtcacacagctggtaagaagcagggctgcttaaaggtgggcaatcgggcagcagaattcacactcttaaacagtactccataatacttctctgtgcttgacctcctggggctcaagcaatcctcctgggctcaagcgatcctcctgccccagcctcccaagcagctgggatcacaggcttgcactaccatgcctggctaatttttttgtatttttagtagagatgggctttcaccatgttgtccaggctggtctcaaactcctggcctccagagatcctccagcctcagcctcccgaagtgctgggattacaggcgtaagccacagtacccagtcctctgtgctctgttcttgataaatgacattttattgtacagatgtgttttatttttagatggaagatcagtgggtgaagattcaggctggttcagggcactgggagtcttgaggagagaggagactcagaagctgccgtcttggagaaaaaaacttactagaaaaacaggaggactccatgtttgaggtttgtggtgctgggttttcagtgaaatcccagaggctggctgagatttttcctgcttcgtgggaggaaatggctttcgcatgggagggggaaagataagtatggcccagttcacagtctgtctgcaaatccccaggcactctggttccccggttctctcggggtcctggaatctggtgctgggtggcctgtctgcccttccaactggccacctggtccctgtgagctgaactccaggaacccagcatggccaggccaggctgcaggggagggaagggcctggaagcctgttcccaggccatggccaaaggaaacgagttaccttccaggaactggagcccagaggcaggggtgaggagctggggagctgggggcctggagggaaagcagtgcccagaacttgcagggcctctgaagctgggctggagtttggctctgggcacgagagccaacagggcctgtcatgggcacagtctccaccccatgatttgagggctgaataatggtcctcaaatacaaccacctcctaagtcctggaacctgtaaataggtgacttcatgtagcaaaagggacttggaagatgatcctgaattatctgggtgggaccaatgtcattacaaaggtctttataaagaaggccaagctcagtggctcacacctataatgccaacattttgggaggccaaggcaggaggatggcttgagctcaggagttcaagaccagcctgggcaacatagtgaaaccccatctctactaaaaatacaaaaattagccaggtgtggtggcaagtgcctacagtaccagctactcaggaggctgaggcaggagaatcgcctgaacccgggaggcggagattgcagtatgccaagattgccctgggcgacagagcaagactctgtctaaataaataaataaataaataaataaataaataaaatttaaaaagaaaagagggagacgagagggtcagaatcggaaaagggaacgtgccaatggaagcagggtttggagtcatgcaagaaacggccccaagccaaggaatgcaggtggcccctgtactctgggaaaggtgaggacacgtactcttccctggagcctccaaaggaacacggccctgctcatccattcagacttgtaaccttccgaactggcagccaataaattttgtgttgccttaagttaatccatttatggtaatttgttacagtgacagaagcttgagacagcaagtttctttttttcttttttttttttttttgagacagagtcttgctctgtcaccaggctggagtgcagtggggtgatgtcggctcactggaacctctgcctcctgggttcaagcgattctcctgcctcagcctcccaagtagctgggactacaggcacccaccaccatgcccggctaattttttatattttagtagagatggggtttcaccatgttggtcaggctggtctcaaactcctgatctcaggtgatccgcccacctcagcctctcaaagtgctgggattacaggcacgagccaccaagcccggcccgagacagcaagtttctttatctcctggggactctgtttctgaaactgtgaatcagtgataactgaatccctgcagcgttgtactgaggctattggacacagatacatcaagtgtttaggatggttgctggcactcagcaagtgcttgacaatattagctatcattatcttcaaagtgttaccaaaacaccaggggtttggtctaggtcatgctgctcacagcacagaaagccaataagggaagaaggctttaattgggcgctgccgctgaggagatggttcaatctcaaatccatctccttgaccagctaaaatcaggggtttaaataacagggaagaaatgtaacaatgtgtaagaaaacaggaactagggaggggcaaggaagcagtcatgatgaatgagaggtccattatctcattgtctggatgtgatgatctggtaagtttcagttatttgatactttttgtttttgagatgcctgaaagtgaaaggaactcagataaaacaaattaagtctcaagcttaaagaccagaagggtcagtttcctatgtttatccaaaaaactatctatgggactattgggtcagtttcaaaagtgtaggcaaagtattcatttgtccaacaaatatttatcgagcatttattatgttccaggcactattactgctggagattcagcatgaaccagacagataaacacttcctgcctcggccctgagccctcaggaaactttcaatctagggagggagaaagacaataaacaaaagaaatgggagaatggcgtgaacccggcagacggaatttgcagtgagccgagatcgcgccactgcactccagcctgggcaacagagcgagactctgtctgaaaaaaaaaaaagaaaagaaaaagaaatgtgtccttttagttttttgtggttattttttgccatacaaaaggtattaattcttatgaagtcatatgtagctatattttcttttctgttctagttttggtactcgtcttacaagaccttcttctctccaagaaaagcaaatgtgaagcacatcaaggtcttttttttttttttttttgagactgagtctcactctgtcgcccaggctgatgtacagtggcacaatctcggctcactgcaacctctgcctcccagttcaagcgattctcctgcctcagtctcccaagtagctgagattacaggcacctgccaccacacccaactaattttttgtatttttagtagagatggggtttcaccatgttgaccaggctggtcttgaactcctgaccttaagtgatccacctgccttggcctcccaaagtgctgggattataggcattagccaccgtgcctggcccaaagtcttaatagttataattgcttttgtttaaacttatatatatgtgtatacatacactcatacatatatacacacatatacacaaacatatatacattcatatatcacacatgcacaaatacatacaacatactcatatacatatgtatatatccacccatatatacacataaatgcacttatatatgcacatatacatatgtacataaatatacatagacacagaaaagcaaacatatacataaatttacacacatatatacacaaacatacacttagacacagaattatagacatacacacaaattcatgcccacacccatagacacacatatacatatatacacgcatgtatatgtccgtatagagagctctatgctggaatatacaaaaacattttttctcttttgaaggaaaacgagaacctgctatggcttttgtgggaggttggggagaagcagacggggcactctccgtttctaattttgtacagctggaatgtctaacactctgcatatcttattttaaaatgtctatgtgggctgttttagcaacaggatgataggtcagttcttgttttcatctttatatggctctttattcaataaaaacaaaaccactgccacctaaaaataaaatgctttaggagccaagaccacgttataggttacagtcacagtcattcttttttttctttatttttctttttctctgggtctggtataaagctttcatttaacctgatttactcttgccaatctgtcgctgaataagccattcatagccctgccgatccaggcctgggcatgtcctggtatgtcagattgtccaagccagcagctgccacggttcccattcctcaggcttcaagaaatgacaggagcatctgccaagggttcatccggccatggtgacctgagagctttataacaacaagtgattgtctaatgaatttgaacacaagggtttgctgttctaggtggcttcacagtgctacgttcagggtatttcccatgtgattttcttaattgtgataagaaataagagttgtgcaattccgctcagaaatataaaaaaattcctccaccaggacactttgaatccttctggatctatgtaaccaggattagaacaggcagctgtctaaccgccattactaggtccctcaagctatgacactgctggaaagaaagggagactaactgattgaacaacctaccaaatccaaaaaagaaatacaataattgagactggacaaagtagctcacgcctgtaatcctaacactttagaaggctgagatgagtggattgcctgagctcaggagtttcagaccaggctgggcaaaatggtgagacccctgtctctactgaaaaaatcccccccaaaaaaaaaaattggctgggcatggtgtcacacgcttgtggtcccagttacttgggaggctgaggtgggaagattgcttgagcctgggaggtggaggttgcagtgagccgagatcatgccacagcactccaacctgggttacaatgtgagaccttgtctcaaaaacaaaacaaacaaacaaacttcaaatgcatgaaactcgtccttcatagcttctgagatatgtctttctgcttagaaaagtactctccctgcttctaagagtatagattacttcaccatttgcagggaggcatttgatgtcttcatgctttgcatttacatctttcatccagctggaatttttctcagtgaaagtaacattggaatagtccatcacgctccaaagaaatgtttggccacttgatccttgtctcatctgctggcctgtaatgctgccttcatcaaaactgaaaatctcacatttagggacgccaaactgtcagaaatattatagattcataatgcattttagcgcctgatagggcatactcctgccccactgtgcatttcagagtttctgggttgctttcatatggtaacaatttttcagcagctcatcttgcatttatatgttaaactccagaagctggacaaagacgaggcgggatgctttacttttacagttaaatgactgggctaggtgcggcggctcacacctgtaatcccagcactttgggaggccgaggagggcagatcacctgaggtcaggagttcgagaccaacctggacaacacagaaaccccgtctccactaaaaatacaaaaaaggcgcggtggctcacgcctgtaatcccagcactttgggaggccgaggcgggcggatcacgaggtcgggagatcgaggccatcccggctaaaacggtgaaaccccgtctctactaaaaatacaaaaaaattagccgggcgtagtggcgggcgcctgtagtcccagctacttgggaggctgaggcaggagaatggcgtgaacccgggaggcggagcttgcagtgagccgagatcccgccactgcactccagcctgggcgacagagcgagactccgtctcaaaaaaaaaaaaaaaaaaaaaaaaaaaaaaaaaaaaaaaaaaaaaaaaaaattagctgggcatggtagcacatgcctgtaatcccagctactcgggaggctgaggcacgagaatcacttgaacccaggaggcggaggttgcagtgagccgagatcgtgcctctgcactctagcctaagtgacagtgagactctgtctcaaaaaataataaaataaaataaaataactaacactatcaataattgttcacattcacccagcactcatccgccatagcacaagaccacagccttacttcttacacattcgcttattttttgttgtgtttttttgtttgtttgtttggtttttttgagactgggtctcattctgtcacccaggctggaatgcagtggtgtgtctctgctcactgcaacctccgcctcctgggttcaagtgattctcctgcctcagcctcccgagtagctgggattacaggcacacgccaccacacccagctaatttttgtattttttgtagagatggggtttcaccatgttggccaggctggtctccaactcctgacctcaggtggtccacccgcttcagcctccaaaagtgctgggattataggtgtgagccactgtgcccggccacattcacttgtttttctagaactattatgcagggattggagcttttccaaagcagccatgcctgaggtttacttgtcattggacttgagcatgacaaggcatgcactttgcagacatcgaaggtagagtttttcagtggcaggcatgcccatgccagaaaaaatttcaaacgaaccaggacaggcagcgacccaccttccaaaacaaggatgctttgtataacgtgcaaatatttgtccagaaatggcaagaaatgcttctaagaactgcagaaaaatccagttaatttagcaatataggtgaatgtagtttggggtaatgtaactttttaaattttttgtttaagtataatgttgttttaatgtaaggaagtataaagaaaataaatgacccactatctgtcctgtccacatcagcattctaaaatataatgtgttaccaagcgtgagagttacagatggggacataatgaagtccttccctccattcccctcagttccccacctcagaagcaacccgttttccatttgttgtttttccttccagaaaaaaggaaaaagattgatacatatactaccatatataataatataatgtttttcatttataaaagggtcatcatatgtgcttgttacttatcacttcataaaatccctctccctctccctctccctctccctctctcgacacggtctccctctgttaccctgtctggagggcagtggactgatcatatcttactgcagcttcaaactcctgggctcaagcaattctcccatttcagccccctaagcagctggaaatacaggtatgtgcttggcctaaatccctatcccttccccttccccttctttccttcctttctttcttttttttttttttttcttttttgagacggagtgttgctgtgtcgcccaggctggagtgcagtggcgcgatctcggctcactgcaagctccgcctcccgggttcacgccattctcctgcctcagcctcccgagtagctgggactacaggcgcccgccaccgcgcccagctagttttttgtattttagtacagacagggtttcaccgtgttagccaggatggtctcgatctcctcacctcgtgatccacccgcctcggcctcccaaagtgctgggattacaggcgtgaaccaccgcgcccggccctttttttctttctccctttctctgtttctccttctttcttcttttattcttccctctctctttcttgcctttttttttttttttgagacggagtcttgctcttttgcccaggctggactgtagtggcgctatctcggctcactgtaagctccgcctcccgggttcacaccattctcctgcctcagcctcccgagtagctgggactacaggcgcctgccaccacgcccggctaattttttttgtatttttagtggagacgggatttcaccgtgttagccaggatggtcttgatctcctgacctcgtgatccacccgcctcggcctcccaaagtgctgggattacaggcatgagccaccgtgcccggcctcttccctctctctttctctctctgtcctcccttcccttcctccccgcctccctccttccttccttgtttctttcctttttttttttttttttttttttttttgacagagtctcattctgttcccaaggcagtggtgtgaacatggctcactacagcctcaacctccctgggctcaagcaatcctcccacctcagcctcccgagtagctgggactacaggtgtgcaccaccacacccagctaatttttattttttgtagagacaggatctcagtatgttgctcaggctggtcttgagcgcctgggctcaagtgatccacctgcctcagcgtcccaaagagctggaattacaggtgtgggtgacagagtgagaccctgtctctcaaacaaaacgaaaaccaaccaaacaccccaccaagcatgaaataaggatgtacatatagatgaatgcaatagagttgacagtctagaaaaccatcatgtgatactattttccgcatggctggcaaaagctctaagctttgtctaaaatcccgttccaggccaggcgcggtggctcatgcctgtaatcccagcaccttgggaggctgaggcgggaggatcacgaggtcagcatattgagaccatcctggctaacatggtgaaaccccatctctactaaaaatacaaaaaattagcctggcatggtggtgggcacctgtagtcccagctactcgggaggctgaggcaggagaatggcgtgaacccgggaggcggggctggcagtgagctaagatcgcaccactgcactccagcctgggcgacagagcgagactccatctcaaaaaaaaaaaaaaaaaaaagaaaaggaaagaaaagtgcttggcacactgtattatataaacctttgtgagattaaataagtaagcaatttttcagttttttatcttttttttttcctgtggattccctattgagattcattgccaggttattctgtatttctttttttgatacgtgcaagctctttgtgattcaaggaaattatcttgagtccatccttgtggtaaatgtgtccccgggtttgttgtttgtcttttgacttgtggattttttttttctgtctgaggatttaaatgtttatatagtcaggttgattaatcttttcctttatgacttctgggcttggctgggtgcagtggctcacgcctgtaatccaagcgctttaggaggctgaggtgggcggactgcctgagcccagcagttcgagatcagcctgggcaacacggcaagccctcgtctctataaaagacacaaaacagccatgcgtggtggcacatgcctgtagtcccagctacttggaaagctgacgtgggagaatcgcttgagcccaggagttcgagaccagcctggacaacatagggagaccccatctctacacaagatcaaaaagtcagccgggcacagtggctcacgcctgtaatcccagcactttgggaggccgaggcgggcagatcacctgaggtcgggaatttgagaccagcctgatcaacatggagaaaccccgtctgtactaaaaatacaaaaattagctgggcatggtggtacatgcctgtaatcccagctacttgggaggctgaggcaggagaattgcttgaacccaggagacagaggttgtagtgagccgagatcgggccattgcactccagcctgggcaacaagagtgaaactccatcccccactccaacaaaaaaaaaaagttaactcagtatggttgtgtgtgcctgtactcccagctactagggaggctgaggtaggaggatcacttgagtccaggaggtagaggctgcagtgagccacgatcacgccactgcactccagcctgggcaacacagcaagaccccgtctccaaaatacaaaaattcttctgcttccaaaattataagtaaactcattcctatttttacctaaatgtttattaatttcatttttcacatttacatctttgattcatctggaaggtatctgaggactcaaagaaggagctagggaaaccaactttattctttttgttttgtccaaatagctagccagttttcagagcattagctaagtttagaaaatctcttttctctcctgccgatttagaataaatagcaccatggctggtcatagtctaagttctcagatgtatgaagctctatttctgggttcatgattctgtcccaccattttgttggcctagttcctcaacacaagtaaactacagtgacatcgtatcctcacaatccattccttgatatatcagtgggactaatccgacgacatgaattttcattttccgggatattctggccattaacagagggtagtcggtttttattttttattttgtttgtttgtttgtttgagacagggtctcattctgtcgcctagagtgtcgtggcaggatcatagctgactgtaaccttgaactcctggcctcaagggagcctcccaacttagactccctagtagctgggattacaggtgcatgccaccatgattttaaatgcagtaatttgctttataatgtcaggacgtggtttggtgaaaccaacccagatgcttgtaagtcaaggatgaaaaacttgggtcacccggcatcactaacattccctaagagctgaacgctttcccctcataaatgtcagggtcacgggaagcaacaggaaaaccttctccaatgactcctctggggtggcttgttgcgccctccctccggaccacgcagcccctaaaggtcagtcccagaccttgagctcagtgtaatatctagattcatgctagagacatgaatcaaaggttcaattttatgagaacgaatgtgtagggcctgaattttaaacacggagccatgttaggctgcaaacagtcttaaaccacagcatgctgatcagaaatgtgaatgagacacacagggagggcaggggcaagtttattacaagatctataatcacacacaagatgcgttaaactgggcccatcagtggctggctttggtgtgcagcattgctatagctttggctgtttattcagtgcacaggattgtaaagatgaaaataaaatagccactccattgctttttatttattattatttttaactaattaattattttgagacggagtttcactcttggcacccaggctggagtgcaatggcgctatctcggctcactgcaacctccgcctcccaggtttaaacaattttcctgcctcagcctcctgagtagctagcattacaggtgtgtgccaccacgcctggctaattttctatttttagtagagacagggtttcaccatgttggccaggctggtcttgaactcctgacctcaggtgatctgcccgccttggtctcccaaagtgctgggactacaggcgtgagccaccatgtccggccattttattatttttttttaaatagagatgggggtctcgccgtgttgaccaggctggtcctgaactcctgggctcaagcgatcctcccacctagacctccataagtgctgggattacaggcatgaaccactacacctggcccagttactttttaaaaatagtttccattcaagtataatttgcatgtggtgaaatgcacacatttaaagtatatgtacaatttgatgatttttgacagaaattcattttaacacctgtgcaaccaccaacccagacacagaaccttccaccactccaaaaagttccttctcaaagtccttctccttactgagacacccactgttgtaatttttgccatcatagattagtttttcctattctagaacttcttaaaaatgaaatcatatagtacgtgggcatcttttacttctggcttccccttagcataaagcctttgagatccatcgatattttttttttttggagcttaatttgtggcatatattcctaatcccaatgatcaataatgtttgtatatcattatattagtatacagattcagtggtggctatttcatgtggtctctgaattatgcctttatatagtgtaggctctgtcctatttggcttggtaaacttacctagattaaacaagaggtgttaattgcacacagaggcctccttgttgtatggttagtacatctagaattatgtggtggtgagcactgctaaaaccagagaattagcttctgtctggagcttatgtaaggaatctagagttgtatatttggactggactctattagtctggaactcttttgctgcctacgtttttttgagatggagtctccctctatcacccagtacaatggcgcgatcccagctcactgcaacctccgcctcctgggttcaagcgattctcctgcctcagcctccccagtagctgggattacatgcacccaccatcatgcccggataatttttgtattttttgtagagatggggtttcaccatgttggccaggctggtctcaaactcctgacctcagatgatccacccaccttgacctcccaaagtgctgggattacaggcatgagccacggtgcgcagccccatcgatattattctatcagtcctgcagtcctgtttattgttgggtaaggttccactgaagggttgtactgatgcaggataggcaagcccccaaattgaggcttagtctaggagggttcttggcttcacccttgaaataattcaaggtcaagctggtggtgatagcaacttttcttgaggccgcagtgcacagccgcagcagagagactgctccttgcaaagcggggctaccccataggcagtgtgcctagaggagcagctcagaagcagtgctgctgtcatatttatacccacttttaattatatgcaaattaaggggtggtttatgcagaaatttccaggaaaaagctggcaacttcagggttgtcaagggcattgccatggaaaggggcagtaacttccaggtgttaccatggcaacggtaaactggcatggtacagtggtggccatgtcttctagaaagctgcttccaccccagacctgttttagctaggtctcaatttggtccagtgtctaagccctacctctagagttgagctccacctcctaccgcagtaccactcctagctatatacaagagaaatctatgcccacacaaaaactggtacaccaatgttcatggtggtattattcaaaatagtcaaaaagtggaggcaacccaaacgtccatcaaccaatgaatggataaataaaatgtggtacaacatttgggctgtttccagatttaggctattatgaataagtatgctattatgcacatttgtgtacacatctttggtggatatatattttcatttatcttaggtaaatacttaggagtggaatgtctgggtcatatcataagggtatgtctaactttttttttttttgagacagagtctcgctttgtcactcaggctcaagtgcagtggcgtgatcgcagctcaccacaacctccacctcccaggttccagcgattctccagcctcagcctgccaagtaacggggattacaggagcccgccaccatgcccagctaattttcgtatttttagtagagacggggtttcaccatgttggccaggctgctctcgaactcctgtcctcaagtgatcctcccgcctcagcctcccaaagtgctgggattacaggtgtgagccactgagcccagccagggtatgtctaactttttaataaatttccaaacagttctccaaagtggttgtactatctctggttactttaaaataaatgaatataagtatttattgtttgtggttgaaatattcaaagacacaagatgaaaagtgggactctgctgggtgtggtggtgcatgcctgttatctcagcactttggaaggctgaggcagcaggacagcttgaggccaggacaagcctgggcaacatagggagctgtctctattaaaaaaaaaaaaagtaaaacaattagctgggcaaggtggtgtgctcttggggtcacagctactcaggaggctgaggcaggaggattgcttaaacccaggaggtggaggctgcagtgagccgtgatcatgccactgtactcaagcctgggcaacagagtgaaatcctgtcttttaaaaattaaaattggccgggcgtagtggctcacgcctgtaatcccagcactttgcatgtctgtaatcccagctactcaggaggctgaggcaggaggatggcttgagcccaggaggcagaggttgtagtgagctgaaattgcaccactgtactccagcctggacaacagagcgagacacagtctcaaaaaaaaaaaaaaaaaaaaaaggagagtcacagaagaaacaccaaatcttaccctgggcactgggatgatgcctcatgtcatgttgccaagctgagacctgccacgcattctcttgctattatgtggccattcaggcctgaacaagagccaggacccaaggggtttgcaagagtcatgcctgagtttaattaagtgggacagatgtgctatttagaaccaggacacctgggagcaagtttaaaggcttggatgtgccctgcctgtgatgaactttagcacagaccagcacagttccctaatcctcttaattgttcataccattacaaaaagtgcaaatctaaaacagagatgaacagaaaaaaattattgcattatcgttaatctgaccacagtggctaatgttgcttgaataatgcatttgggtgcttttaaaagtctgcagtcagcctgggcaacatggcaaaaccctgtttctaccaaaaaatacaaaaatagctgggcatggtggtttgcacctgtagtcccagctacttgcagaggggctgatataagaggatggcttgagcctggaaagtcaaggctgccatgagccaagatcacgccactgcacttgagcctgggtgaagagcaagaccctgtctcaaaaaaaaattaaataaataaaatttaaaaagtctgtgatgttttattttttaatgtggggaaaatattaaaaagtaaattggccgggtgcggtggctcatgcctgtaatcttagcactttgggaggctgaggcgggcagatcacgaggtcaggagatcaagaccatcctggctaacacagtgaaaccccatctctactaaaaatacaaaaaaaaaaaaaaaattagccgggcatggtgacgggtgcctgtagtcccagctactcgggaggctgagacaggagaatggtgtgaacccaggaggcagagcttgcagtgagctgagatcgcaccactgcagtccagcctgggcaacagagcgagactccatctcaaaaaacaaacaaacaaaaaaagtaatttaaaaatatgtaggtcgtggtggggcacagtgtctcatgcctgtaatcccagcacttcaaaagactgaggcaggaggattgtttgaggccaggcattcaagaccagcctgggcaacatagtgagacctcatctctaccaaaaaaaaaaagttagctgggcatggtggtgcgcatctgcagtcctagctactcaggaagatcatttaagcccaggagtttgaggctgcagtgagctgtgaccacacaattgcactccagcctacatgatggagcaagagcctgactcttaaaaaaattttgtttttaaataattgaaaatactactcaaacacacatgaatctcaaaaacacgatgctggccgggcacggtggctcacacctgtaatcacagcactttgggaggctgaggcgggtggatcacgtgaggccaggagttcgagaacagcctgggcaacatgatgaaaccccgtctctatgaaagatacaaaaattagccgggcgtggtggtgcacacctgtagtcccagctacttgggaggctgaggcaggagaatcgcttgaacctggcaggcggaggttgcagtgagccaagactgtgccactgcactccagcctgagcaacagagtgagatgctgtctcaaaaaaaaaaaaaaaaaaaaaggccggggcgtggtggctcacgcctgtaatcccagcactttgggaggctgaggtgggcgggtcacctgaggtcaggagtttgagaccagcctggccaacatggagaaactctgtctctactaaaactacaaaattagccaggcgtggtggtgggcacctgtaatcccagctactcgggaggctgaggcaggagaatcacttgaacccgggaggcggaggttgcagtgagccgagatggcgccattgcactccagcctgggcaaaaagagtgaaactccctaaaaaacaaaaacaaaaacaaaacaaacaaaaacactatgctgaggaaaagaagccagacaccaaaaaaaccatatgctgtatgactccacttacagcactcctgggacagacacactgagctttggctggaaaaatcattacagtgctcacctctgagagctgcggcggggaccgactgggaaggggcacagggaggctttctaggatgatgatattgttctgtaacttgtcgcaggggtgggttacacaggtgcctgcctatgtccaaacttatccttatcagaccgttcacttaagatctgtccatttcactgtatataaatgttttattttaactaaaaaatgaaaatgtaaaaaaaaggaataaatgaataagtaaatcaacacaacccacttctttctccttggcagctctgctaaccagatccccaaatgggcagctttttcttgggcctcctgggtccagctactgtcacctccccactaggctcccagctgccacctcaccctctgcagtctgttccccaccaggcttccagggggagcctggaaacaacctatgtaggatcctgacgctgtgttcagcaccctcccatggctcccatctctcagattaaagctggaatccatcctggccgcacctgtggggctttgcacaccagcctccaaagccccctgccctcttgctcctcacctcctccttgcttttttatttttatttttttgagacagagtcttgctctgtcgcccaggctggagtgcagtggtgcgatctcagctcactgcagtctcaacctcctgggttcaagcaattctcctgcctcagcctcccaagtagctgggaccacaggcacgcgccatcacacctggctaatttttttgtatttttagtagagatggggtttcaccatgttggccaggctggtcttgaactcctgacctcaggtgatctgcccgccttggcctcccaaagtgctgggattacaggtgtgagccactgcgcccagccttactcactttctgaaacagattagagcctccctccacgatgactgttccctctgcccaggaggccgttcttggccaactgcttgtctcacccctcacccccttcaggtctgttcagacatccagttcccagagaggctcccccaaccattgtaagcgacagccagccgtttctgcacactcaccttgcctgcctatcttcctgttatatttttcacggcagagctccccacccctccacctgtgtctatataaggtctgtcctcactcaaacgtcaggctccaggaagccaggactctgtcttgctcctggctgtcgtacagcagattctcaacgaaccttgcttgaatggcagcatgggcaaccaggacactttgccctcgagccctgctggtggcatccacagctctccatcttcctgcaaacactccgggccagcgcctccccagacgcacccctgaacagaacacctccacccggggcgatgaggtttctttgaagagagctttcatgtgccccaaccttggattccccccatttttagggcacgtaggcctttcatactttactgacagcctgggtgtaaccagtaggagtgactattattgtgggaggtacttaaacatcttggtcaaatagggcttttcccattgtgggggtgtgggggcacccaataaatagagcttcatccagatgcttctatgagtacacggcagttcctaacgagctccgcgtcctcaaatcccagcttcccttttggtctctttcgcatctttcctcataatctccattcactttcacaaaacctcaacctggacccctaaggacacttccgtttccccaagtctgaattattccacctgaagctctccaacctgtattattaatagaattcttggctgggcgtggtggctcacgcctgtcatcccagcactttgggaggctgaggtgggcggatcacgaggtcaagagatcagagatcgaggccatcctggccaacatggtgaaactccatctctactaaaaaaaatacaaaaatattagctgggcgtggtggcgcacccctgtagtcccagctacttgggaggctgaggcaggagaatcgcttgaacccgggaggcagaggttgcagtgagctgagatcatgatactgcactccagcctaggagacagagcgagactccgtctcaaaaaaaaaaaaaaaaaattctcaggagaaactgtttaagacgcagataactatgtacaaccccgaagagatcctgaatcagcaggtagagccacgaaatggtaccttgaacagattccaagtgactgatgtagtggccaccctggttcaggagttcctggggaggggcaggggagggccagaagaaaactatatttttagctaaaagacctcagcttctggcttggcatggtggcttacacctgtaatcccaacgctttgggaggccgaggtgggcagatcacttgagcccaggaggtagaggctgcagtgggctgagactgtgccactgcactcccacctgggtgacagagcgaaactccatctcaaaaaaaaaaaaaaaaaaagaccttggcttctgtgtgagggaataggaagggagggaaaggttttcattttccagctgtttataaaaaaataaactggtactttgaggtaatttgcgtcaccagatacctattctagaaaccccaagatctgtgggacatccttccacatcagtggaaagccattcgcaaagaggacaaacggcttcttctctcatggatcattaacaattctcaaagcttgaacccgtatctgataaccagtcacatctggctgggggcactgtttgaggaaaggggaaccctttcctcaaatttaatagtccatgcaatcctcacctacaagagacttaacaggacacttaatttgctaaactttattttatacatacacgtttacatttactagtcatggtgtcaacttgttaacacaacgaagccctaatggacccgttttgaaattagaagctggacagttacaggctttggtctcttcaagaatccaattcacccctgggtttcgcttggcacacaccccaggagaacgtcgatgcacacagctgtgtagctgcaaacggaaaccactctcttttctctcgtatttttcagtcagactcactcaggattttgaaatgaatcatcacgagaaatttgttttaaagttgaatcactgagaacatctaacaactgttcacattctttatcacaaaaactgaagtcggaaaagacgccctgaaaacttgcaagggctaatactctatgatagaatattactactgttcaccatgttaatacatttacttactaccatacacctgaacagtcacggcagaacaagagcatgtgaatgacgaaaggaaacttgctttcagggtgtcagattatagaacatgcacaggaatttcttccacttctaacctcgctcatcagtcacatttacaagaaactcaattttaagcaaagagatgcctgaaataactaagacgtgtacaaaaacaagttaacctatgaacacaaggtaatattctgatagtcttcgatgtgacttccaacatatctgagtagtcacttttcagttttttaaacacgtgagaaaaatagatttggattacatctttgtggacggctacgatacagtttggaaaccattatctcagggaccctgctctctcctctacacatgcgcacgcaaacacacacacacacacacacaatgacacatggtggtctggtctaatatagtgtgtctgaattcagagggcagacattaacagccaagttttgtttttttgagagagagtctcactctgctgcccaggctggagtgccgtggcacaatctcggctcattgcaacctctgcctcctggattcaagcaattcatctgcctcagcctcctgagtagctgggattacaggcgcgcgccaccacgcccagctaatttttgtagagatggggtttcaccatgttggtcaagctggtcttaaacgcctgacctcgtgatcgacctgcctcagcctcccaaagtgctgggattacaggcgtgagccaccgtgcccggccaacagccaagttttaaaagatttttttcccctcttactataatgtgagtagtgaccttctgctgcaaagatggtgacagtttggtgcaaagatggtgacagttgggtagatggatggaattagagctggggacctaggaatgcctgcgtccttccctataatcaccccccttccccacaggattcctgagagggctcatcccaaatgggaatcaaagtgccatttttactaacagactctaaaactcaaagactttgaggtctaggcagacattctttttccctaaaactaactcttgggacctcctggctagataactggaggatggaagctggagactgaaggagcaataaaaccaggtttgcagcgaaggtcctggcttaacttaccccgctggttacacgagaggaaggcgggaggaagaatatggcagggccacccagctcttccaaatgccagggcctgcagaggtcgctgaccattccgaggagggagcaaggcgtgggggagaaaagctgaacatggatgagtgtaacagtgaccctgctcatgcataaaggggaatgaatgttctagaattttcccaatcctcttaccaactctcctgcctccgaagagaaggtgagtagagaaggcggtgaaacggcaggcctggtagagaaaagggcatagagatccacctcccttccccaactccctcccacccaagacctcacctatcgtttacctcagggccagatctctatcaacaggggccctaagagagtccaaagtcttattcagtgacaagagagaacttggttgacttggtacttcttccttgttctttcaactcctcagtatgggtggtcccccagatcaaacctttctggattctgcaaataaatgagagaacagatcaagaagggaagcagagaggtgtcattaggaaatgcattacttccaagaaatttctgggtccctgaacatttctattccccagccaggtctctagaaaacttcacccttaaagccacataccctgcaaacaccataactccaaagtattaatattttttttggggggaggggggaacagggtttcactctatcgcccaggctggagtgcagcagtgtgatcttggctccctgcaacctccacctcccaggttcagggagggtaagagcccagaccgcccttccaggagcccctgaaggccgatgctggagacatctggtgggcagatgtctggaggccaatcccaggccttggcctccccagtagctgggattacaggcacaaaccaccatgcccagctaatttttgtatttttagtagagatggggtttcaccatgttggccaggctggtctcgaactcctgacctcaggtgatctgtctgccttggcctcccaaatcattaaattcttttttttttttttggagacaagagtctcactctcgtcacccaggctggagggcagtggcacaatctaggctcactgcaacctccacctcccgggttcaagagattctcctgcctcagcctcccgagtagctgggattacaggtatgtggcaccacacccggctaattttttgtatttttagtagagacggggtttcaccatgttggccaggctggtcttgaactcctgacctcaggcgatctgcccaccttggcttcccaaagtgctgggattacaggcatgagccaccaagcctgggcccaaaccattaaattctcatcaaggaagatgggtcagatggagtggcaaatgaccacagtgacactcattgtgggtttcctctgccacctcctgcccaccagatgtctccagcatcggccttcaggggctcctggaagggcggtctgggctcttaccctcctcaactggtgtgtcatccacctcctgccatgcaccagggtcctcctcatcacccgcttgacccaccacctcctcgggctcctctgccccacctgccactcctgctcctcctgcctcatccacttgctggcacgagcccagtcacttctgctatcattctcaccattggtggcacgccgaggagagccttctggcttggccttcggacccctagaggttgaggctgttgcctcggcaggctgctggccccgaggggccttctgatctgatgcctcccttcttgagcctggccctttctttggcatcaccggcttcttcctgccatcttctgagtcaaccaagacgtaggagacagggcccaagctcaccttcttcttcttcctcatgggagcggggttcttggcagacacccaggccacggccttcttctttggtgggctttcatggccaccatcttggtctgactcagaggcgcctcctgggctctcggcttctgcccgggcatcctgaggtggctctctgggacccttccaggcacatttcgccatgggcttcttcaaagccaactcctccttattcacacagggctttctgctgcccttgatcggctctgagatcgccatgctttcagcatcacccacctcaggatcctccaagttagctgtgctgttggaattgatgcctttgggttttttccagggcactgcttcctgcctggagttcttcttctgcttctttctcctggagcgagacttagctccagccctgcgaaccaaaggtttggtaggctcatgctggtcttccgtggcattccagttgttgggggtctctgcctttaaggcagaacccacctctgctgcaagccccggttctttcttcaccttcctccctgctgctaaagcccaggctgccatctcctcgaattcagcggcctcctgggccctggcttcctcccggctgcggatctcggcatccatgcagaagatgatctgcaccactgctcccagaagcacccccagagcttctgcccagttctctgggggctgatgctggttctgggacagggtggggtggttgagctggagcaggcggaccacatcctcccaggtgcgcccctcggcatccaggaattcattcagattttttaaaaactcggcatcctgggtagggtctctacagaccactctccagacaccaccccttcctgggaattcacgggggatggtgctcagattcacaccttcaccaacctcaatgagggcagctttaacattctcttccctcacaaaaatcttgttgagcacgcggtacgggcccagtggggagaggaccccattcaaggtctcctcaatttctgcctgcccacagtcctctgggatgcctgtgaccaacaaggacctgtggatgtccacttccattcccctgcaccaatcctccagaaggttcatcgccatggtcttggacatttagcggctctgaacctactatgtgtagtaaatagtctatcaggtggacgtgggctgcagcggtctccaaacagtaatcctgcaaggtgacaagggagcgaggtcacgttcccaggaagatgaccaagctcacagatcctagctgccccctccgcggctggcctgcaggaggcctggcgctttcccaacaccctcctccccaacccaggccccggtgctcacacgtgtccctgaatctgcagcaaaaggccctaggaccctcccccgggcctgacgctccgcctgcccagccgggacttacttggcagatcagcctccgaccgcccagccaggccaaggagacgcagtggaatgcagccgtttcccagtcgctggctccggctaccccggcgccgctgctagaggcagaaagggccaagaaggcgccgtccgcccccgctccggcccaggcgggtcacggggcgtccagactcgatgccgttagcggcgagaagccgaggttggcgtcgcagcgcgcgcctgcgcactggctcccgcaccgccgctcgggggtcttgggctgcgcaggtgccgacgtctccatggcaaccgggcgtgggttgctagggctgagcccggccggcgcgccggcgctgcaattggacctagggagccgggtgcaagagtggcctgttcaggtcgcagagcaagcgggtctggatacactccggtggcgcctccacggaggccctctttcaacccaagtgggcctcgcgaacgggggttaggtcgatgagaagcgccaacacctatggctgcacccactgactgtattatcctctgccccacctgttggattcacccaacgcaactcttgggagacactagaaatcaagaaaggaggaaaacgaggctttaatcttcttgggttcctccaacagcaggtgcagttcctgttgggcttgtagccttctctcttacaagctgctgggttcttccaggaatttccagaaacttctagaaatttcttagtctcctccccgaccccttctagcatgaggataatgcctcgccttttcttgtttcctcaacgtgattcagggcaggttcttggcatcctccaggcaggggacaatgttacagctcagtgactgcccctacagagaagtgttagtccaaactgcaaccattttgtaagccctgactattttgcagatcttggtcaaagtgaaatattccacgggggttcgggccaatgagaaacatcctgcctaatcacctgaccacaaggcggacaaaggcccagctaaagaaacattatcataccctatcgtgcaaaggcccaactgaagaaacatccctatcatattctgctgggagaaagtgcagagaacaccacattccaccagaacaagggccagaaccgcctcatcatggaaccatcttatcaacatcctgctgggcagcaaaccatactgctcagacccctcccacccataactataagtacccccagcctataagcagcagtgggctctggcattaggctggttacccacttccacaggtgtctgcagtatacctgagttgctgttgagccgccttctgtctgtgtgtctttaaccctcaccttccctccaaaacctaacaaggagggctaccctctaggcagtgtgctgagaatagcacctcggggcaaggctgcagtcacatttatacccacttttaatgacgtgctaattaaggggtgggttttcagaattagcaaattggcagtaacttatgggtgttgccatggcaatggtaaactgtcatggtgctggcaggcatgtcttatggagagaggctttcggtgccttttccaggttttggccagtcttcaatgtgatcctcagtggagtcccctgggcctcctacctcaaccttgctgcccatgagcaagaactttgttaatagtttattaatgcccagtgctgtggctcacgcatgtaatcccaacactttgggaggctgaggagggcggatcacttgagctggggagttcgagaccatcctgggcaacatggcaaaaccccgtccctaccaaaaacgcaaaaaattagccaggtgtgataggggtcacctgtggtctcagctattcgggaggctgaggtgggaggattgcttgaacccaggagaccctgtctcaaaaaaaataaactaattaattaagcactcctatgagactcggttggactggccatctgtttttttttttttttttttgccagtccctcactgatccacctaccaatgtcccttcctggctgtgtgatcttagagaaataatttgaccccgctgagcttatttcttttctctgtaataggaattctaataaaaaatcttcctgatttggaagttttgaagattcggggggatctcatctgaaagatgcatggaagtacaatttgggccttggtattcaaccaaaatctgttctttgggttcatttttgaaactgacatttgcaaggccaaatagccaaatgttcatttcactgtcatctctggcattcctaaatttgggcatcatcaatacttgtgtgattgcccaagtttccatcatattttgtgctaaaaagttgtgtcattcaaatcgttaacctctgattattcacataattcacaccgaatattccaataaacactctagctatgattaaagtctttaaatctcatgtgctttatatgttgaaattctacatatcagtggaagaatgagtgtatatttttaggcagtggtttaaaaacatagccataaattctccgacacttctattgagaagtgacgatctgtgtcccctcctcgtgaatctgagcagacttgtgactactttaaccaatggagtttagtggaaaggaagctatgtggcttctcagactatgttacagaagggcacgcagcttcttcctcattcactggaacactttttttttttcttttttgagacagagtctcgctctgtcgcccaggctggagtgcagtggcgcaatctcggctcactgcaagccccacctcccgggttcacagcattccaggttgggaagaacaatgaacaatttttctgagagatggctaatcacaatcccccatgggcacaatgacctctttctgcatgtagccccctccagcatacccctatgaaacttccagtccctgcctttttgcagacagcccccttctctgctgtgctgcccattgcaaccgtgcaatgtattttcatatcttctctaataaatctgcctttctttacctacaactgtcttggtaaatacctttactgcccacaacacccgccgcacctagtcgtacccgtgacagttgggggtgactcaaatgactgagagctagaatcatctgggagtttcttcactcacatgtctggtgcctgggctgaaatcctttgaaagctgggctcagctgggaaatgttgatggaagcactgatgtggcttgggcttcctcacagcatgaaaaccagagggtagatcgttgaacttcttatttggaagctcaaggatgcaagaacaagagtgttcctgtgaggctgggcgcggtggctcacgtctgtaatcccaccctttgggaggttgaggcgggtggatctggacgtcaggagatcgagaccatcctggctaacatggtgaaaccccgtctctactaaaaatccaaaaaaattagccgggcctggtggcaagctcctgtaatcgcagctactcgggaggctgaggcaggagaatggcctggccaacatggtgagccgaggctgcaccatggcattccagcctgggggacaagagcgagacttcgtctcaaaaaaagaaagagaggccggcgcgggctcacgcctgtaatcccagcactttgggaggccaaggcgggcggatcgtgggtcaggagatcgagaccaccctggctaacatggtgaaaccctgtctctactaaaaatacaacaacaacaacaaaaattagccgggcgtggtggcgggcgcctgtagtcccagctactcaggaggctgaggcaggagaatggcgtgaactcgggaggcagagcttgcagtgagccgagatcacgccactgcactctagcctgggcgacagagcaagactccgtctcaaaaaaaaaaaaaaaaaaaaaagttactctagagaagtatttgggacccccatgggaatgagatgcgtctaccaccgtaacaggagggacctctgcatccaggacatctgggtccaggaacgctagtaggagtgaaggtagaaaaatgaagacgggctgggcacgatggctcacgcctgtaatcccagcactgtgggaggccaaggcaggcagctcacctgagatcaggggttcaagaccagcctgaccaacatggagaaaccctgtgtctactactaatacaaaaattagccgggcatagtggtgcatgcctgtaatcccaggtacttgggaggctaaggcaggagaatcgcttgaacccaggaggcggaggttgcggtgagctgagattgtgccattgcactccagcctgggcaacaagagtgaaactccgtctcacaaacaaaaaaaaaaagtaaattattttttgaaaaataaatataggttaaaatagtgaattttatgttatgtgtattttactacaaaagtgaacaaataatgcgttacagaatggagagatggggggcaagggagggagagagatgccttcagctttgcctcaaaagccaggtttcagctttctgcagagccaatattcctaacagtcctggctgccccttcaggaatgccacccaaccccagtgcatgagcacagaatcaaagttctggaactttctcttcaaagagaaaacaaaacatctcagtgtgtttgaaaattctgctaaggatttgtcagaccaaaaaaaaataataataaaaaaataaaagaagaagaagaaaatcgtcaatctagacaggataaaaagtaaatttataccagcagtggattgtaaaacatcataactaaaatgaaatggaatggatgtttgctgaatctcagaggcttttgctatgtttgccaagtagttttacaaatgcgggagcttgtttgtgatccaggctgcagacaaagttgctgcagtggaaactgagtcacacagtgactcagttagaattagacactgtctgttttttcttctctctttttcagttatttattttggcatgcaagggaatgacagacactgagttttgataaatactggatttttaaatgcaataatcctccaagtgactatctctggggagaagaagagggcaagtcatatgggaggtaggacacagcctatttaaacaataattttgtttaaagatgtgtaaataaatttagcatagtattaagatttaataaagaatggcaagggatacataagggttaattatataaatctctttttttttttttttctgagacagagtcttactctgtcccccaggctggagtgcagtggcgcactcagcctccacctgcagggttcaaacgattctcctaccttagcctcctgagtagccgtgattacaggcacgtgccaccatgctgagctaatttttgtatttttagtagagaaggggtttccccatgttgcccaggctggtctcaaactgctgacctcaagtgatccgcctgcctcggcctcccaaagtgctgggattacagacatgagctgctgagtccagccaataatgctaaaaaaaaaaaaaaaaaaaaaaaaaaggtgtaaataaatttagcatagtattaagatttgatgaagaatggcacgggatgcatgaggattagttatataaatatcaattctttttttttcgagactgagtctcactttgtcacccaggctggagtgcagtggcgcgacctcggctcactgcagcctctgcctcctgggttcaagcagttctcctgcctcaacctctcaagtagctgggattacagggacccgccactatgcctggcaaatttttgtactttgttttgttttgttttgttttaagacggagtctcgctctgtcacccaggctggcttgcagtggcgcgatctcggctcactgtaagctccacctcccgggttcacgccattctcctgcctcagcctcccaaatagctgagactacaggtgcccgccaccacgcccggctaattttttgtatttttagtagagatgaggtttcaccatgttagccaggatggtctcgatcttctgaccccgtgatccgcccgcctcggcctcccaaagtgctaggattacaggcatgagccaccacacccagctttttttcttcttgagacaggatcttgctctatctcccaggctacagtgcagtggcaggatcacaactcactacagactcaacctcctgggcacaagcgagcctcctgcctcagcctcctgagtagctgggaccacaggcatgcaccaccacgcccagctaatttttaaaatttttttgtagggccagggtatcactatgttgggtaagatggtctccaactcctgtctcagcctcccaaagttctggaattataggcatgagccaccgtgcccagtcaattctctattcttgactttgagtttggaatattccacaatttttattttattttattttattttattttattttattttattttattttatgagatggggtctcactctgtcacccaggctggagtgcagtggcttaatcacagctcaccgcagccttcatctcctgggctcaggcagtcctcttgactcagcctcccaggtagctgggactacaggcatgtgccaccacacctggctaattttgcatctttagtagagacagggtttctccatgttagtcaggctggtctcgaactcccgacctcaggtgattcacccgcctcagcctcccaaagtgctgggatgacaggcatgagccactacacctggtttttttttttttttttttttttttttttttttttttgagacagagtcttgctctgtctcctaggctggagtacagtggcgcactgcaacctctgcctcccaggttcaagcaattctcctgcctcagcctctcaagtagctgggactacaggcgtgcaccaccacacctggctaatttttgtacttttagtagagatagggtttcatcatgttggccaggctctcaaactcctgagctcaagtgatcctcccgcctcagcctcccaaagtgctgggattacaggcatgagccatttcattgcatctggccatgtttttgccattactttcaatggcaaaaactgcaattaattttgcctcagcctaaatattataaaggtacaactatgtgtgtatatgtgtgtgtgcgtgtgtgtgtgaagtggagtcagctgcctgcctgctctcccattaaagagccacagtgattgctagctgatttaaaaatagttcaagcacccttaacaggaatcattacagtggtttccatgacaacacgatgtgctgtggtttccaaggcaacaactggcactgtggtttccatgacaaagcatccctgcagccccaaccctcccctccatctctgcacttccagtttagggttctccttccatcctcttccgctgtgtttcacctttgagtttttattttgccctgctgtgtatgttcagtgagaacccacagagtttccataaacactgaacccaaagaaagtccagggggctctgggatcccgcctagatgtttcctcctgagtcagttgcaacaacccatcatggtggttctgtgactcaacctggctggctctgtccaatttgttctgtgagagccccttcttgctgcagagtttccttttttaaattattttttttcttttcttttcttttctttttaattgaggcagaatcttgctctgtcactcaggctggagtgcagtggtgcgatctcagcgaggattacaggtgcatgccaccatgcccggctaatttttgtatttttagcagaggcagggtttcaccatgttgaccaggctggtctcaaactcctgacctcaggtgatctgcccgcctcggcctcccaaagtgctgggattacaggtgtgagctaccatgcctggctttattttctattatatctacgtgtgtgtgtgtctcctaggtcacagcaaaatgtatttcttatcacggatcatgatcaaacacatgtgacagccactgccataggttaattaccgagtcccctatggatggctatgcaggtcgttctctattttccggtctttcaaatgaagagctgagaagggctggtggctgatgccctacagacatctatgttgcttggattcaggtgtgacttcttaacttgtttgaaaatatggccgggcgcggtggctcacccctgtaatcccagcactttgggaggctgaggcgggtggatcacgaggtcaggagatcgaaaccatcctggctaacatggtgaaaccctgtctctactaaaaaaaaaatacaaaaatgtagccggatgtggtggcaggcgcctgtagtcccagctcttcgggaggctgaggcaggagaatggcgtgaacccgggaggcgaagcttgcagtgagccaagattgtgccactgcactccagcttgggcaacggagtgagactccgtctcaaaaaacaaaaaataaataaaatatgatgcttttcaaaagttacagtgtcagctggttgcagtggctcacgcctgtaatcccagcactttgggaggctgaggcgggcagatcacttgaggtcaggagttcgagattagcctgcccaacatggtgaaaccccgtctctactaaaaatgcaaaaattagctaggcatggtggcccatgcatgtaatcccaactactcaggagactcaggagaatcgtttgaacccgggaggtggaggttgcagtgagccaagatcacaccactgtactccagcgtgggtgacagagcaagactctgtctcaaaaaataaaataaaataaatgaaataaaataaaatagcccgagatgggaggattgcttgaggccaagagttcaaggctaggcaacatagggagacacctgccctcccaccaaccctgtgtctatttgtaagataaaaaattaaaaacggccgggtgcagtggctcatgcctgtgatcccagcactttggggggccgaggcgggtggatcatgaggtcaagagatcaagaccatcctggccaacatggtgaaaccccgtctctactaaaaatccaaaaattagccaggcgtggtggcaggcacctgtagtcccagctactcgggaggctgaggcaggagaattgcttgaacctgggatgtggaggttgcaatgagccgagatcgcgccactgcactccagcctggtgacagagcgagactccgtctcaaaaaacaaacaaaacattaagaacataaagtccagtagttttatgccacaatcctagcaactctatcctgggccgttctgagttagctctctctctctctctggaaataaccaataaaaccttaggattatgcggcgggagaagagatgtgttctcctttgagctggggcgggaggcgggggtggtggtcgggttacagccacagctgcaggccctgaatttccttctgacagaaaaaacgccagcagctgtctccactctctacagtgagggaacaacattccaagtgaggaattgtggccaggaaaccgagaggccccatgtccttttcttttcttaatgtattttttctgaaacacacacacacatacattaaaaacaatccaccaataggattacattcatgtaagattcaaacataatcaaatctaccgtgtggagaaattcatagtttgttaataagcatacacgtgtatagaaaaggcagcgtttatcacaaaacaggatgttatttatccctggggcagggagggatttgagatggccagagcacatgaggggcttctgggaggacgatgatttctagatcagatgacagtaacataggacttgctatgtaattatttgccaaattatatatttgtgtttagggcacgtttctggaggcatgttacatattctacaattgtaaaaaaatgtttttttaaaaaacacagctacacattcagggttatagcggtgaaataaatgttatcactatttttttctagaatattctatggctgaaaacctgaacgcagcagtaaaagtacacgtttttaaaacgactcataaaccaaatgcacaaaacacagtcaggtgaagtttctctcatttgttacggaggttggtcgtatttcttcctggtgcctggaagacgtcacgtggtctgaacacagtcttggctggtgatgattcctgatttttgtctgaaatccttggccaaagaaaagaaagagaacaaatgagtctctttatttttttttaaagaaggtttgtatcatatttctcgaattctaaatgtatatttatgtttgacaaaagttataaatatctacttgaagaggtaacacaggagaaaaactggcaagccaaatttaataaacgtaatgaagagtttacattgtgttatgtggagagagatcatattctcttgttatgggcggaatcttatcgtcttgtgggcttggaagatgtcacacaaaggaaataagaatcacatacatttacagacaggcctggccaacatgatgaaaccccatcgctactgaaaatacaaaattagccgggcgtggtggtgggcgcttgtaatcccagctactcgggagactgaggcaggagaaacacttgaacccagaaggcggaggttgcagtgagccgagattgcaccactgcactccagcctgagcgacagagtgagactctgtctcaaaaaaacaaaaacagaacaaaaagaaaaaaagaattacataaatttaagccctaaatgcaaggaaataggttaggtaggacattaggaccgaggggtcaccctaattaggaacagaaacgtatgatccaagagtagagagattttttgccaactgaaacaagatttctgcaggaatgaggccatctttcagggccacccactcaccccggggaaaagtttttagcttagaggttgaagagaaaaatgaatcatttggacatctttcctctttttccctccccttggctaaacccagtatttccattaaaatgctccacgtccatcccaccctacttagtctacttgcttttgttttgtttttttccctagcaccatttatatagacttttttttttttgagacagagcctcgctttgttgcccaggctggagtgcaatggcatgatctcggctcactgcaacctccacctcccgggttcaaatgattctcctgcctcagcctcctcagtagctgggattacaggcacgtgccaccacacctggctaatttttgtatttttagtagagactcggtttcaccatgtcaaccaggctggtctcgaactcctgacctcaggtgatccacctgcctcagcctcccagagtgttgggattacaggcgtgagccaccgagcccagccatagacattctttatctgaccacaaaagtgatgtatgattactgtagaaaaacttgataaatatggggagaaaatcacccatcattctgctgcacatatatcattaccatttcactgtagaacgttttgcttattaaagttagaatattggttttaaggagttcgaggctgcagtgagctgtgattgcaccactgcactccagcttgcacgacagagcaagaccctgactcacacacacacacacacaaaggaatgtcatatcagcagtcagactccctgggtgtcaacacttcctggtggtgtggctttggacaagtaattaattaacttctctgtgcctcagtttcctcatctataaaatggtaactattagactagtaccaaactcataaagaggtgaggcttaaagaagtcaattcaagtaatggtcttagaatggtgcatcacaagtacccaataaatgtaagctataattatcatccatgtgaggatgctgtaaggatgaaatgagttcattcatacaaagtgtttggaacagcccccttggggccaaaataggacaccttgttggctctatgtaaagattcactattaaaattaaggaaaatgttttaattgggggatgcaagagtttcatatctttatttcatatagctacaaacttaaactaaggctagattctaaaaatatgtctgttcattcaaagcacataaaaagatgctcaatatcattcatcatcagagatattattaaaaccatgatgagttgccagcctccttgctttcttttatacacagcaactcaggccagacgcggtggctcatgcctgtaatcccagcactttgggaggctgaggcaggatcacttgaggtcaggagttcaagaccagcctggccaacatgatgaaacaccatctctactaaaaatacaaaacttagctgggcatggtggcatgcgcctgttaattccagctattcaggaggctgaggcaggagaattgctagaacctgggaggcagaggttgcagtgagctgagatcgcaccaatgcaccctagcctggcaacagagaaagactccgtctcaaaaaaaaaaaaaaaaaaaaaaagaaagaaaataagagaaaagatggagaacaacctgaatgtccaataatgggactgattttcaaatatggttcattcacacagtgtaatactacacaattgttaaaaagaaaaaaaaaggcatgaggaagatctcaatgtgctgataaagatgtccaagctacaatgttaagtgaaaaaagcaaagtaaggatcattatgcataggatgctactatttatgtcgaaagtaaggaaaaaatgcacctattcatatatactttatatgcattaaaaatacttggaagtggctgggtgcagtggctcatgcctgttatcccagcactttgcaaaggaggccaaggcaggcggatcacttgaggtcaggagttcaagaccagcctggccaacatggcaaaaccccgtctctactaaaaatacacacgaaaggaccaggcacggtggctcacgcctataatcccagcactttgggaggctgaggtgggtggatcacctgaggtcaggagttcaagaccaacctgaccaacatggtgaaacaccgtctctactacaaatacaaaaattagccaggcatggtggcgtgcacctgtaatcccagctacgtgggaggctgaggcaggagaatcgctagaacccaggaggcggaggttgcagtgagccgatattacaccattgcattccagcctgggggacagggcgagactccatctcaacaaaacaaaacaaaaccaaaaaaaatgcacacaaaaaattcagctgggcatggtgttgtgtgacggtaatcctagctcttcgggaggctgaggcaggaaaattgcttggacccgggaggcggaggtttcagtaagccaagatcgcaccactgcactccagcctggatgacagagcgagactccatctcaaaaaaaaaaaagaacacctacccggtaacagcatctccaccaatcacgccaactctggttttgagcctctgaaatcaagaaactctgctttcaaacagcttatgtgagcttctgtttttggccaggaaaagcctctctttgtcccccctcctcagacgcatctgtggcttgccatagccctgcatcctggattacaatcctttgtgcttactcctgaatacattcctgctatcagaagacatttttctctgatgtcttttttttcaggttgacacaatagatagcttatttctttaccccgtttattgtccttgtctttttaacagaccatcagctctgcgggtggggcctttctatctgttctgctctggtgtgcccccagcttctagaacagggctgtgctgtgttgaattgtgtctctcaaagttcatgtccactcagaatctcagtgaagatgagatcatgccgaattgggttgggctgtagatccaatgactgggtcctagtaagaggaaaggtacaaccaggtgcagtggctcacacctgtaatcccagcactttgggaggcccagacgggcgaaatcaactgaggtcgggaatttgaggccagcctggccaacatggtgaaactccgtctctactaaaaacacaaaaattagctgggtgtggcggtgggaacacctgtaatcccagctacttgggaggcagaggcaggagaatcgcttgaacccaggaggcggaggttgcagtgagccgagatcgtgccactgcactgcagcctgggcaacagagtgagactccgtctcaaaataataataataataacaataaatcctaatacagacacctatgcagatacgtacagaagttgttgggagtatttcattttttatcaaataaaggggaaagggtcatagtgtatgaacttttcttgcatctcactgtgttcactcaaaaggtcccagtggaaactctccagtccgtcctttcaagactgcagaagaacccttgtgtggttggaccatggttcacttggccactctcctatctgtgggcatttgcagggcccgggctgttttgccaacacagtgaagccaccttgatgcttaaaacttgagcccatgccagcctgtggtgtgctagaaatcctcactctttatgaacccaatcatctcgtgcaccacggtggttgtgttgctttacattttgtgtgtattaaagccatcatttgctaaatgtcactgattaaactataccaccgttcagtggtgcggctgaaatgatttgacacatcttcattttctaatgaaccaggagacttttctaaaaagcagactgggccgggtgcggtggctcacgcctgtaatcccagcactttgggaggccgaggtgggtggatcatgaggtcaggagatcaagactatcctggctaagatggtgaaacctcgtctctactaaaaatacaaaaaaattagccaggtgtggtggcgggcgcctgtagtcccagctactctggaggctgaggcagaagaatggcacaaacccgggaggcggagcttgcagtgagccgagattgcgccattgcactccggcctgggccacagagtgagactccgtctcaaaaaaaaaataaaataaaaaattagccaggcgtggtggtgggtgcttgtaatcccagctactcaggaggctgaggcaggagaatttcttgaacctgggaggtggaggttgcagtgagctgagattgcaccattgcactccagcctgggagacaagagcaaaattccgtctcaaaaaaaaagcattcacaaactcctaaacccacaattttaaacaccatgctccaagactcatcagtctagacacacacatgcatacaagcctatgcacaaacacagatcaatacagacacccacactatgtgcagacacatacacctactcatgcacacactcacacattcactcacatagacacggacacccatacacaccctaatggctgaggggtgagcacacacctgtatgcacactgggacactcagacatggattcacatacacacccctaagtgtacacacacacatacactcaagagacacacgtgtcaatcacacacaaggttttgatcctcccaccccctctgagtatccctgacactttgggcaaatctgtctcccactagagtctctgtttcccccttgagtggacatactattttctgcgttccattcccagcatcttcagtgtgacatccagtgaggccccaggggtgcaaggagcccttgggtaacttgagatgagatgcgaacagaggcgtcaatattttcaaatcaagggggtttcaaatggagcctgcagggccagttcccctgaggtagccagttgatgcctctggggtatggtttcaaacgccccagaaaaccagagatttgactccaaatcagccttcatctggaccagtccagccacccctcactgtcactaaagagaaaaatgagaggccacaggtgattccagaacacagacatgaagggaagagatgctaccctgagataggggttgggggaggggggctttctgggtccccctcccaggctcactgggtgtgacaagagaagaggaaatggttagagatgggaggaggggtttggagccccgctgcctgactcccccagcattgccccttgcaagctgtgtgaccttgggctgattacttgacctctcagtgcctccacatcctcatgggaaatggggatcacagcagagctttcctgccagcactgcccaggggactgaagagggtgtgatgtgtttgtgaggtcatctcgtcttatttctgctacgtatcagcggcggccagctcttcactgcacacctcagccctgacagggaccccagggcagcggtgcccaccccggctgcccctggaatgacccagagcccatgtccagcctgcagatctcggcagccgctctcggaatctctgaatggtgcagggcacggctggggcagcaacagtccctaaagctccccggtgattccaagcaatgggcagccggggctcacaaccgcgaccctaggggtcctagagaccatcagacgccacagccgtggttctcaaactagtcccgcatcgcaggcacctgggggtcctttgaaaatgcagcttgctggacctcacccccaaaggggttctgtaggtctagggtgggcccgagaatgtgtatctagttcccaggagacgttgacgcaggtccaggacctgattttgagaaccgctgtcctgcaggaaagtccgctttccccagcctggcgttcaaagaccagggagggttgtccctttaaagcgctggggaaagcgccgtggccccacgattttaaacggcggaactggggtgcctcctggtggaatcagcgggcatcgcaactcgcgcggattcttcccctgctctggagtcgtaggttgcgggggcaaagggaagggtcgtcgtctgcggcgcagttctaggacgtggccacattcccagagtttggggatcgctcatttcccgcttaagcaggccgaggggccaagacaagttcagcctctaggggaaagggtctggaccccgggattcttcgcggtggggaggtggcgggggaggggggagagggaagaggtgagggagggtctggggtctggaccccaggataccttggcctcatccttgggggaggaccattccgtccctcccctggggccgggagggccgattattcgagggagccgtagagtaagacaaacgtgggttccagctcccttccttgcctctctgagcctcggtttctctatctgggaaatgagggtgaaaatctgccttcatcctcttccctccttcatcctgccctcctctctacagagccaataaagacgcacagacatatacattcgaatgtgtccacccccagatccacacagagacacaaacacatacacacacaacctcagcccgccagtcacctggtcagctgaaatcaggctcctgaaaactcttcaaccacttcctgccatccccaccaccctgcgccggtccagccttaggcctgtcccctaggttcccgccccagcctcctcctgctccagccttgcaccctgcacacgacagacctaaagcataaacctctccctctcctgttcaaatccctcccatggctccccagcgcttaacgaggccctgaggccctgccagtctgcacgccctactccagggacctcttcatgctcatttgctgcctcaggtgaaaatccagccagacagcgaccaccatggaggcaggcggccttctttggcgtcactgcctccactccaccagcacttagcctggcatgggaggggcagtaattacacgctaataaccccctacagtcatacccttggcttgggaagcttttgccctggctcttcctacaccccggtcatggacttcccccaggcaaccgccggccgcacgtccttcgggtctttgcaacattcagagaccccgtctctacaaaaaatgcaaaaagtagctaggcttggtggcgcgtgcctgtggtcccagctactctagagggaggctgaagtggtgggaggatcgcttgagcccaggaattcgaggctgcagtgagccgtgatcgcgccactacacttgtcaccttctcagtgagggcttcccaggccactttcccaggcccgtttatgacgactgcaaaccctctcctgccccggccctcctcgggccccctgcttgccggacttttgtcccccagcaggtctcaccccctaatgcatggatttcgtcctcatctagggagcgtaaccccagcctccccaccgcatgctccctgcgggagggtcctgtttcctgcaccaagaacagggcctgggacgcgccagccctggataaatctcatggactgcgcggatggcgctgagggctcctcccagacagtcgccttctctcccaggagggggcaaccgcgctccgctccacccgtcgccagaggctccacgcgcgggacagacccggctgctgcagcctgtgctggtctctgtgcaccgggacccttccctgcaggatctcaaggcctttacgcggctgctccttcgaccccaaacactcctccccatccccgccggagcactccctccaggaatgagggaatgaaaacaatgtttctttccagcacattccccaccaggcctatctgggatctgactcacccagtccgcgtggttcattccgaccgtcagtcattcaacaaataacagccgccgccgcgtgccaggcacggtgttggggctggggacacgaaggggaaaggccaagccacactttttccctacggagctggccctaagccgctctgccgcgcctctccccgccacgcccacctgcccccatgccgcataggtccccacagccaccgctcagggccctctgcaggggctgctgctgctgcaagcccacggggcgctggggggagtttgaaagcaggaggaaagggacgccatttgggggaatgctcaggccgtggtggcagcagcagctggcggtcactgcggtgaaccaggggctcccgggtctctcctcaagcaagccggccccgtgcgtggaacttggcagtcctacactagggctctgatcaccagcctttcccaagtggctcctccagccctcgggagggagcagctccctgcattgctaatattgggacaaaacgatctccctgtttttgcacttcctgattgcaataccccagtcaccaatttcctctattaacctccctgacaagtacagtcggtgtgccagggggcagtcatagctctgaaaaataaagggaggaagtgcagaaagggttccttttttttttttttttttgagacggagtcttgctctgtcacccaggctggagtgcagtggcacgatctcagctcactgcaacctctgcctcccaggttcaagcgattcttctgcctcagcctcccaagtagctgggattacaggtgtgcaccaccacaccagactaatttttatatttttagtagagacggggtttcaccgtcttggccaggctggtcttgaactcctgccctcgtgatccaccctcctcggcctcccaaagtgctgggattacaggcatgagccaccgtgcctggccggccacaaagagttacatttttataggtggtcagggaagccctccctaggaatgtggcatttgaagaaaggtctgagtgacatgaaggttggagccacgcctatagcccaaggaagggcactccaggctgcaggaagagcagtgcaaaggccatgaggcaggaatatgcctggtgtgtcccagagacctgggtggctgaagccacaggagacacagagagggcagtgggaaacaaggcagagggtgagatgggggtggagtgtgtagacctgagctgcgagggagagctgcatgcgatggccatgtcctgcaccagcaccgtgcaatgcggtagccactggccacgtgtggctcttgagcacttgtgacgtggctgggaagactgaggacatgcatgtgtatttttatttaatcttaattacatttaaatccaatttaccccgtgtgattacctagttgaacaaagcatgtctagacagtcctaagaactgcagatatgacggcacaggaaggagaccttgggggatctggggaggcgagggacgcaatcagaccccaggtgtgacttctaagaggacgtctctggcagccatgtatggtggggggacacaggatggagggaggcagaaaactcaggtaggatggaaagctgagtctgaggtccagggcacaggtgaggggtggaggctggggggagagtgcctgcagctgtggcctggcagagtgtatctgggtggaagctagggtggggattggctgggcggggtctccatgggtgtccaggggcttcggagctgaggctggaagtggggaggcatcaggggtgggagtggaagctggctcagatctgcaaggggtgagatgatgctggggggtagggagagccaggcagggatcccgaagcagcaaaggacagtgtatgtaaaccagtgacaggacagttcccaggtattctgggcaaaccacagtcaagaccgtggacatctgtggcccacgctcccacaccccgcctgccccactgcccagagcacagagagagtacagtgctgaatttcactttactggaggatccaggtgacacagggcacagggagagaagcctaggactgctacgggagaagcacacctggggccctccccacccacaggcaacaccacaggctgctgtgcccagctcaaggtacacccagcctggtcctcagtgggtgggtcactgtccagggacagcctccaagcagaggggagcacccacgccctgcagcaggtctcagtcagcttctacatctgggtgtccctgacataggactgggacagtctggtctggactgtgaggtcacacccaaaccctcctattccttcccagggacaagtggggcagggccccctggcacgatgggctcctcactgccagggaatggaaattgggacgaggaagcacacacattgccccagggacaagaaggcatgaatgaaggtggggtcccgtggagactgatatttaggtaaaaatcgagctcagccggggttgcaggagctgaagcatacggcacggcacggcacagactcacatacaactcaagcgtgcttgggacagcaggttgtgaagcctcacagcaccggcccgcctactctggaacctccagggcagggctggggtttcctccccaggtcatttcatcccctgtaaggagggacacgcggccggcttctgcactgcccaggtgagcctctgtccctcacagtgcccttcggggcccctctggcctttaattcactcagggggtgaacccagggactttcaagtcttttagtaagggctgcaaggccagcgctgagcggtgggtcagctccactggagagggggcacccaggggagccacagcctatgggaggggccagggcccactcagcccagaagaaccaaaactggattttaagtgaattaccccaaattgaacacctctgcaaataattagaatgttgggaaacactgcagtctgagtgacaaattcaacttgtggtcaggggcaggtggccttggcctggggctggttcctttgttatcaggggcgccccagtaggcagggctggcatgtgtcttccctctgctcccccctccccctcctcctcctctttcccttctcccaccgttcctctcccctttcctcctcctccccttcccaaccgccttctatctctcagactttcctttctggaatcatctcttcccctggctgggagctggggcctcccctggctgagagttgcgccctgacacgcgctgcgcggctggtgactgagcctccaccacagacccagggcccagtcagactggggtaggggcgacagcggcctacagcacctgccaggcgcaggccccgagagcgccacgaagagccctgctcgcctctgcaggtgcccggcgtccacacacacaccccctccgggggcaacccgggcccccaatcctggtccacttggcgcgtccccatctcggccctgcgctgctgcctcgggcgcccacttctctttcctcctcccatccgggcttcctccgtcgggatcgctggcgcccccggcctgcgagggcccgagaggggaacgtgacgctggcaaaacgcggcccgggcgcgctgtgaagcgaggagattgcgtctgcggaggacaggaagaggggaggggagggcgggggccacaggcgggcgggtgccctgcggggcctgctcgcagcctgggcggcttcttggggggccactagcggcatttagggggcagcctccggccccgacgggccttcttcccgcgcgcggccttggatccagtgggcgcctggcccttggcctcgcctgccctggcatgggccccggcgcccgcgctccccttcttcttcctgcttcctgcggcgtcgtcctgggccgagccccggctcccggctttcttctcgggagtgacgccccggcctcggcctcggccgcccgcgcgggttttgcgggccccggaagcggtgggaggcgcgccggccggagtcaggcccctgggggccgtgcgcgccctcttggcccggggcttcctggatgccctgtcctccggctccgacgcctcgctctcggtgtcctccgactcctcctcggactgttcgtccgaagcctcctccgacccctcgttggaccccatgttctcccgggcggccaggagcgccaatacctcccccagtttgcctttggggtatttgtacttcccgccttcccaggcgttttctttttcctccttcatcacctccgccatgtcctgggcagccaggagcgccaccagctccagaagacccccttcgtcctcacggtgctcgctccagcccccgaagaggccacgcccagccttcttcgcctggggagggagatccggctgcgccaaggtggaaatgcactcccggaggtccccgtcatccccggccttgcgcaggaccacggcgtccacctcgcggcccgcctcttccaccttcacgcgggtcccgttagtgtccttggacatgacggacaagacctgtcggagggggtctcgcttgtctttctcgtcgctccagcccagcgactcgataacagaagcgattttcaacatctcctcccgggcccaggggtccgacgggtcggtataggccacaatggccacgaactcaggattatccaactcctctgtttcttggtccccactttcctgcgagtcgctctccgaagtgtcgctgtccaccggctcctcgtccggggtgtctctcacagccagcagggccactaagtcggggacaccatttttgtcttctttggtgttcaagcggatggattcggccccagctggctccttctctgcctcttctttcttcgatttgtcggtgacggtgaccagagccaagaactcgcggggaccgtcttcttccccctcggagttgcagggcgcccactgcctaaccagctccctggcagcggcctgcagcgtggcgtacagcgcgctctggtcctcttctccgctcaggtcgccctggtcgatctcctcgatcacgatgcccaggctctcgtcggaagagtcctcggcctcactcctcgcgggagcagacggccgtcctcctcggcttctcttcttgcccttctgggtcaacctgttgcgtctggttctgtttctgcgaccccgacggcccctccttgggttcctggctgccccaagaagcgagccagcctgccctgttacctccccagaatcctgggcctgcgtctccgaagcgggaggggtgggtgcctccccgggggtcccagcctccgcggcctgcgtgggcccgtcatccagcagcaggcgtctcatctgcctcaggaccctcgtgtcctgcgcacggtccttccacagaaccctccagaccccatccttgcctgggatctccctgggaatggcagcgtgattgacgtcctccacaaactccaccagggcggcctgggccttctcgttcatcaaagccttcatgtgtcgcaacctgaacgtgcccaggggcaggagggtcggctgcaggacggcttcgacgtctgcctgctccaggccctccgggatgccggtgaccagcagggccctgtgcgcgtccacgtccaggctccggcaccagtcctgcaaaaggctcatggccatggtgcagcccccttggcgctgatcttggggcagcagggagcccgagataggggtgggctgcagcgcacggtgtcaatgcaaccctagaaagccacttgcagggcttagagtcccggttccggtgaatgtggcaaggctggagtggggctcggggctcgggggctctagctgcctgctggccggctggacgcagtgaccttcccccgggacccctctccagagctgtctgaggatccgcggggggcttacgtgtctgctttccaggacagctccctccctctctccctgacacaggcctgagtgactcggcaccgcagccaggtgcaggggggcggcgccgagtgcacctggagaggcgtgggaggtagcagccgcagcttgcctggcgctcgcgccgcgtctgagcgcgcaccctgggcctgaatctcagcagttccgctgcgacgcggctgctcgcgcgtgcgcctgcgcagagggagccgcacaccctcccctgtcccccgcccaaccgtctccatggcaacggtgcagccttgagctggggtctgcgtcgctgtggcctgagacgcttttcttaaaggtcccgatgacaaggacttggggcctggaagcaccactttcattaaccagcaaaaaacaaggccgaaaccacagagggccagaaatcactcaaggatacccgacctcattcaggggatagaggcctccttccagagggtaccggcatcactgggggttacaattcccccttccaggggccaggtggaattcaggattatataggcctaaatcaaagggcactggccttgcagcgtaggaccaggacttactcgggatactggcctcattcacagtatatgggtctcagtatcaaataggggggcccaggcaccacctgtgagcaagacaccattcagggtatatgggcctcacttgcagggtacaggccccactcgatgggaccggccctcactcccatacacgttcctgtattctgaactatgcatgcacaataaatcctgtggttttgcacacgctttgagcatatgtatgattgtgagaccaggcatgaattttgcaagaaagcatttcccttgactgggacagcagactggggcgtgtgaacgtcagtcatagctactgtaaacatgcatttgcttctctgtcccttgttggccatgaggctgtcccctactctatatgaatctggctctgtagaccagctggtaggtttatatctcaaccatcatccctacctcaaagggttttgtttttttgttgttgtttgttttggagatggagtcttgctctgtcactcaggctggagtgcaatggcacaatcttggttcactgcaacttccgcctcccatgttcaagcggttctcctgcctcagcctcctgagtagcaaggatgacaggcctcccaagtagctgggattataggcatacaccatcacgtctggcaagtttttgtattttttgtagagatgggtttttaccatgttacccaggctggtctcaaactcctaacctcaagtgatctgcccgcctcagcctctgaaagtgctgggattacaggattacatggtgagccaccatgcctggcctcaaagggttctcatgaggattaaagggaataatccaggaaagcatttagaagagcagctggcccacagctggtgctccatgaaagatggctaagagaagtatttgttgagaacttaccattataaaagcatctgttttgttggtttgtttttgagatggagtcttgctctgtcgcccaggctggagtgcaatggagcaatctcggctcactgcaacctccaccacccgggttaaagccattctcctgcctcagcctcccgagtaactgggactacaggcatgcaccaccatgcctgactagttttttgtttgtttgtttgtttgagagagagtctcgcactgtcactcaggctggagggcagtggcgtgatcttggttcactgcaacctccgcctcccggcttcaaaccattctccagcctcagcctcccaagtagctgagattacaggtgcccgccaccacgcccagctaattttttgtatttttagtagagacggggtttcactatgttgggcaaccttgtctcaaactcccaacctcgtgatccgcccgcctcggcctcccaaagtgctgggattacaggtgtgagccaccgtgcccggcctagttttgtatttttagtagatggattttcaccatgttggccaggctggtctggaactcctgacctcgggtgatctgccggcgtcggcctcccaaagtgctgggattacaggcacgagccaccgtgctcagcccaaagcatctgttaataaacaaataaataggaaaccaaaacacctcgagttttttgtttttgccaccaggcccaaccccttacttttgtgtttggatttttttatgtttaaggagagtttaactgcaaggttaccacagcaactgggcaaaccgcttactcactcctattttcccccactttttcctcctctgatcttcctgatccacagatggatgtgatgtgactcttttctccagagcagcgttgtccagcaggaatagaatgccagccccaaattcgaaccgcacgtgcaatgttaaaactcctagttgcagccagccaacactgacctcaggtggtccacccacctcagcctcccaaagtgctgggattacaaagtgtcatttttgacatttgaatctccaatctaggctgggcatggtagcgcacgcctgtaatcccagctacttggaggctgaggcaggagaatcacatgaacctgggaggcagaggttgttgcattgagccgagattgcgccactgcactccagcctgggagacagagcaagacgctgtctcaaaaaaaccaaaccaaaccaaaccaaaccaaaccaaaacaaaacaaaaaacgagctgctttttctgcatctattgatctaaaaaaagaagaaatatggtgactcaccatgtaatcctgtaatcccagcactttcagaggctgaggcgggcagatcacttgaggttaggagttcgagaccagcccgggcaacatggtgaaaacctatctctacaaaaaatacaaaatttcctagggggccaccttcaataaatagaaaagagggaagaaaaatgaattttaagaatagattttggccaggcgcagtggctcacgcctgtaatcccagcactttgggaggccgaggcaggcagatcacttgagcccaggagtttgagaccggcctggccaacatggcaaaacctcgtctctacaaaaaatacaaaagttagccaggcttagtgacacacatctgtagtccctgatactcaggaagctgaggtaggaggattgcttcagcccaggagatcaaggctgaagtgagagatgatcatgctacactgcactccagcttgggcaagagaatgaccctgtctcaaaaaaaaaaaaaaaaaaaaaaaaaaaaaaaaaaaaaaaaaggaaaaggaaaaagaaaaagaaaataaagaatatatattatttatcccgaaatatacaaagtgttgtcatttgcacaagttgtcaatgtaaaacaattatttatgagctatcagacactctcttttcataatgagtccctttggagtagccgtatttcaagggctcagcagccacacagggccattgggaatttgtttgcaagaattaattagggggagagagagagagagagagagtgtgtgtgtgtgtgaatacactcagcacaactgttatttataactgcaagattggaaaacacaacaaaaagagaaacaggaagcttgcactttgtgtgtgtgtgtgtgtgtgtgtgtgtgtgtattttagagtcagagtcttgctgtctcccaggctagagtgcagtggcatgaccatggctcactgcagtcttgaactcctggcttcaagcacctctcccacctcagcctccagagtagctggaactgcagcacaccaccacgcctggctaattttattttttgtagagatggggtcttgttatgttgcccaggctggtctcaaactcctgggctcaagtgatcctccttccttggcctcccaaaatgcagggattgcaggcgtgagccatcatgcccgatgaagctgacacttttctaagtcgttgtggataaccacaggtgaaattcttgtaaaaatgaagattcatataccatataacccacccatttaaagtgcacaactcaatggctgttagttcattcagagttgtgtgaccaacaccacgattgattttaaaacattttcatcacctcaaaaagaaatcccacactgcttagccatcaccctccaaccctctaatctccccccagcccccggcaaccactaatctgctttctgtctctacggacttccccattctggacatttcatatgaatggagtcatacaatatgttgttcctttgtgtctggcttctttcactcagcatcatttgttcagtgttgtgtggcaagtgtcatccaatactctgttccatttatttagagacagagtctcgctctgtcacccaggctggggtgcagtggcacaatctcagctcactgcaacctctgcctcccgagttcaaggagttctccgagttcacctgcctcagcctcccgagtagctgggattacaggcacccaccgccacacccagttatttttgtatttttagtacagacagggtttcaccatgttggccaggctggtctcaaactcctgacctcaggagtttgcctgcccatctgcccatctcggtctcctaaagtgctgggatttcaggtgtgagccactgcacccagcctccattctttttatggctgagcaatgttccatggaatggataaatcaaattttctttatccattcatcagttgatggacatttgggttgtttgcacttttgggctatcatgaatatgctaggaacataggagcatgatggatatgctgtgtgcaaatttctatgtagacatatgttttcatttctcttgggcagacacttttaggagaggaatcccggggcacatggtaactctatgttgagtcatttgaggggctgaagggatgcttttagcaatggtcaacgcagagcaagagtctttcctacttcccacaaagccgctgtaagtgctaaaatggagttaggttctggacccagatcattgtagactgatttttcaacagtgtcacaggctggatggcttagataacagaaatctattttctcccagttccagagtctggaagtccaagatcaaagtgccatccgggttagtcttttacatttgcccaataaccaagcaagtcactttgtctcttcatggctctgtggccccagtttatcgtgaggttgtgaggatttaagcgggatgtgtgtgtgtgtgtgtgtgtgtgtgtgtgtgtgtgtgtgtgtgttggaacagtgcctggccctgagtgttactgggacaaagatttcattctcaccgtgggacaggatgaggtggcacgctggaatgcagaggggactccccaggagagcgtctggtttataagaggacccaaaggtacagaggctgaattatgtctctttaaaattcatatgttggagcctgggtgtggtggctcacgcgtgtaatcccatcattctgggaggctgaggcaggtggattgcttgtggtcaggagttcgagaccagcctggccaacatggcgaaaccccatctctactaaaaatacaaaaattagccaggtgtgatggtgagtggctggaatcccagctattcaggaggctgaggcaggagaaccgcttgaacctggaaggcggaggttgcagtgagctgagattgtaccactgaactccagcctgggtgacaggcatgactgtctctaaataaataaataaaataaaataaaataaaataaaataaaataaaataaaataaaattcatatgttgggctgtgtgtggtggctcacacctgtaatcccagcactttgggaggttaaggcaggcagatcacttgaggccaggagttcaagaccagcctgcccaacatggtgaaaccccatctctaccaaaaataccaaaattagctggtcatggccaggcatggtggctcatgcctgtaatcccagcactttgggaggctgaagtgggtggatcatgaggtcaggagatcaagaccatcctggctaacacagtgaaaccccgtctctactaaaaatacgcaaaattagccaggtgtggtggtgggcacctgtagtcccagccacttgggaggctgaggcaggagaatggtgtgaacccgggaggcagagcttgcagtgagccgagattgcgccactgcactccagcctgggcaacagagtgagactcccgtctgaaaaaaaaaaaaagaaaagaaaaattagctggtcatgttggcaggtgcctgtaatcccagctactcaggaggctgaggtgggaggattgcttgggcctgccaggtcgaggctgcagtgagccatgactgagccactgcactccagcctggatgacagagtaagaccctgtctcaaaaaaaaagaaaaaaaaaaaaaaggatagactatgaaccccaagccctgtgcacagaagatcttacagggaccagccaggcagggacatcaggatccccaacatgtcctgcccagtcccgccctgggcatttcccctggaatcatgatctcttcttaggcagagatgagcctatgactgaccaagccactgcctgtaaggttccaatggaaacagctggaagaaagggcgtaaagcgttcaaggccgggcgtggtggctcacgcctgtaatcccagcactttgggagaccgaggcgggtggatcacatgaggccaggagttcaagaccagcctggacaacatggtgaaaccccgtctctactaaaaatacaaaaattagctgggcctgatggcatgcacttggagtcccagcaactcaggagactgaggtgggaggatcgcttgaaaaaattgttcgaaattcttctccccctcattttgtgttcgagaaaaatacaagtgaatctgcttaactggaaatggcgctattggagcaagggttctctttctttgttttcgttttttttttttcgagacggagtctcactctgttgcccaggctggagtgcagtggcgcaatctcagctcactgcaagctccgcctcccgggttcacgccattctcctccctcagcctcccaagtagctgggactacaggtgcctgccaccacatccggctaattttttaatttttttagtagagacggggtttcaccgtgttagccaggatgatctcaatctcctgacctcgtgatccgcccgcctcagcctcccaaagtgctgggattacaggtgtgagccaccgcccccggccagagcaagggttctcaaagtgtggtctggggacctctacgggttgcaaggacattccagggcatccatcagataaaaaccattttcataatactaaaccattatttgtcttttcactcttactctcttaccagtgttcagtggaattttccagaggctacatgccgtgccgtattgcagctgactgaaccaggaggcaggtcaaggattgttgagccagatatcaaagtgagttgaaaaacaccaaaatactacagtgccactcttctcactaactttgttttgttttgggaaatatatctatttttagggctaggcaaggtggctcatacctgttatcccagtactttgggagaccaagacaggaggattgcctgagcccaggagttcgagaccagcctggacaacataaggagaccccatctctacaaaaaatacgagaaaaattagtcagttgtggtggcccatgcctgtaataccagctactggggaggctgaggtaggagaattgcttgaacctgggaggtttgaggctgcagtgaaccatgattgtgccaccgcacttcagcctgggaaacagagtgagaccctgtctcaaaaaaaaaaaacctatttatatatgttatctacatgagtgtgtaacatgtttgttactaggcaggagattttcaggctccagatggccctacttggctggtcaccgttagatcttacgtgcacggggcctggggctcagggtctattcttttctctctctctcgttttttttttttttttttttttgagacagggtcttactctgtcacccaggtggggtgcaatggctcaatcatggctcactatttttgaaagggttaacaaataccatattcttttaatttatcaggagagattcctaatagagtaaatatcgacacatataacccacataaacaaacgctctttagggtccttgataattcttaataatttgagaggtcctgagaccaaatcgttggagaatatacatactcgagaatataacacaatgttccctagggcccaaaacagaaaaaccatatttttcagccgggcgtgtgtgtgcgtgcgtgtgtgtgtgcatgtgtgtgtgtgcgtgtgtgtgtgcatgtgtgtgtgcgtgtgtgtgtgcatgtgtgtgtgtgcgtgtttctccagcaagttacagttgaatcatgggagttaggtgcactgcagactcatctcccatctcccctccgttgtctttctgctcctctcttttcgcctcagagcagtgttgccagggaaaccagatcagcacatcctcaacacaaaatcaatttacctcccgtgtgtctggagggtgacgaatggcaggtctgcctttcaacacgtttacatccaaggagctgtcaactccgcctgcctccacgtcttagaaatgccattttatcttcatccccctctcccattccttttcacttttcattttgtgatggctgtccttttattttcatgtgttcctgcaaaatgtgcattgctgtttgggggcatctaggctaaatttgcataacttgttttccatgatctatctctttttgtttctcatggtttttgtgtgtgtgtgtgtgtgtgtgtgtgtgtgtgtgtgtgtgtgtgtgcggttttctttctttttttttttttttagcactcagcagtaacgtgtctaagattgatcccagttctgtatcttgctggtaatttcacctgctgaatggggctgcatggttgttaaacattgctgcaagttctttaactctgctgagaggtgagatctacctcctctttccttgaagctgaatctgggtgagtttgtgactacctcaactgctagtgtacatccacttgctctgtgtctttcaaggttagctggatgctaggtgacttccaaggttagttataaaaggcttttgcctggttcttctggaataattactgcttggaacttagctgccatgccgtgaggaagcccaactcacatggagagctctgcatgtaggtgctcaagtcaacagctccaactaagtccagtcttcaaatcatctcaaaccaggcaccggacatatgagtgatgaagcttccagatgattccagaccctagccattggggtcatcccagctgtggccccacacattatggggccaaaagaagccatcccctttcataactatggacccatggaatctatgggcataatgagatgttgctgctttatgacactaagtgagggttggtttgttacacagcgaaagtaaccagtgcacacccagatccatctcctgctcccacatacacacagcacaaatactctaccataaatgttcttgtacacattttcttatgatgttgaatgagaatgagacactgagactgcccttggcataggtcccaggagcagaattgcttgggtctgcatattcctttatttatttatttatttttgtcaccgagtgacagtagccatcatggctcacaacagccttgacttcctgcactcaggtgatcctcttgccttagcctcctgggtagctgagactacaggtatgcaccaccacgtcttgcttattttaaaaaaatttttgtagagatagggtctcactatgttgtctgggctggtctcgaactcctgggctcaagcaattctccttcctaagcctctcaaagtgccggattacagcatgggccactgcgcctgactagggtctgcgtattcctaactctaccaagtcctacaagtcactcagtgcaatgaatgtccctatttgctcacatatgaggattcctgtgcccccagtgcccactcccacctctggagattgtccaggcttctaggatttgcccatctcatgggcataaggtggtagctcattgttctccaactacaaatgagtttgcacatctcttttttagtttatttggaaatccccttctttaaatatcctgttcatagtgttttcccattttctcattgctgtttgtgcttttaccaccacaactgttgactttttttttttttttagacagtctcgctctgttgcacaggctggagtgcagtggcactatctcggctcactataagctctgcctcctgggttcacgccgttctcctgcctcagcctcctgagtagctggaactacaggcgcccgccaccacacccggctaattttttgtatttttagtagagacagggtttcactgtgttagccaggatggtctcgatctcctgacctgtgatccgcccgccttggcctcccaaagtgctgggattacaggcgtgagccaccgcacccggctaattgttgacttttttgaacagagcccaatgcaattcctaaaggtattttagctctttctgttgctccaataatatattgttaaatgtgaataacatttctataatacaaagaggatagtataacatggtgctcagtaaatcttgtattgaacagatggaggaagaaaggaaaggaggaattataacatcacacacaccatgccaagggatgatcttatgccagacattggctagaatagcctttaatatattgcttcatttaatcttcaccacagtcatgtaaagccagccccattattatctctatttcccagatgagaaatctgaggctgtgtgtgtgtgcacacacacgcagggtggaaggtcttttacaactgggaagtggtgagacatcaatttgacctcaggtctctgtgactccaaacctctgattcttttgtttgtttgtttgtttgtttttgagatggagtcttgctctgtgagcaggctggagcgcagtcgcgtgatctcggctcactgcaacctccgcctcctgggttcaagtgattctcctgcctcagcctcccaagtagctgggattacagccacctgccaccacgtccagctaacttttgtatttttagtagagacggggtttcaccatgttggccaggatggtctcgatctcttgacctcataatctgcccgctttggcctcccaaagtgctgggattacaggcgtgaaccaccgtgtctggctccaaacctctgattctaacagggatactaggcagactttcagcagcaccatccctcctcagcactcattcattcatttgttcatttaatcatttagcaaacacaaagaacccacacgtgtgggatatgactgtgactacatcagaccagggcctggctgacatcatagggagatcagatatgaaccactaataactacgaattcataatgatgaaaagagtgaataaattacttcacagactttctgtggattttcatgtgatgatgaaaaacagtgagctgggtcccaatgtatttcctggcaactggccatgttctattgttgcagagaagcaagatataggatgaagtgtatcagtgattccattcacactagagcggaccatgaaatatggatttcaaccttagtcaagcctcatcatgttccaccttagaaaatgctaaaaaatgttaacccactatttgcaaaagaaaacaaaaagctgggctgggcgcagtggctcacgcctgtaattccaacactttgggaggccgaggccggtggatcacctgaggtcaggagttcgagactagcctggccaacatggcgaaaccccatctttactaaaaaagcaaaagttagccgggcatgatggtgggtgcctgcaatcccagctacacagggggctgcggcagaagaatcacttaaaccccagaaagtagaggttgcagtgagctgagatcgcaccactgcactccagcctgagcgacagaatgagactctgtctcaaaacacacacacacacacacacacacacacacacacacacacacaaatgaaaaacaataaaagcaagcattcagtaagatgtgacatgcaccaaggaggagacacatgaggtgctgtaggacgagtaatggctctggggggccggaggggttgtgagaaacaaaatcaaggtcccaagggataaaacccactcctggggcggggccccgcggctcacgcctgtaatcccagcactttgggaggccgaggagggcggatcacttgaggtcaggagtttgagaccagcctggcaaacatggtaaaaccccgtcttagtaaaaatacaaaaattagctgggcacggcgcgggcacctgtaatcccagctattcaggaggctgaggcaggagaatcacttgaacccagaaggtggagattgtagtgagccaagatcgtgccactgctgcactccagcctggatgacaagagggaagctccgttaaaacaaaacaaaacaaaacaaaaaaaacaccactcctgggaggaaacagctagtgacccaagttgaccagggtctgctttaagacaaggaatgaagaggtctccaaagaccagagtatcccaggggaccacataaaaaagtctttagtttttcaaatagtttgcatgactggacccttgggacaccggcctgagaaggaaggaattagtcaagagatggacaatgccagaaaaagcttttccttggaaaaagaccctggtttaagttcaagatagcctcatgagtaaagaagcaagacacaaaagtgtacatcttttttttttttgagatgggagttttgctcttgttgcccaggtgggagtgcaatggcacaatctcaactcaccacgacctccgcctcctgggttcaagtaattctgctgcctcagcctcccgagtagctgggattgcaagcatgcacctccatgcctggctaattttgtatttttagtagagacggggtttctccatgttggtcaggctggtctcaaactcccaacttcaggtgatccacccgcctcggcctcccaaagtgctaagattacaggtgtgagccaccgcacttagctaaaagcatacatctttctatgattccatttgtatgacattctaggacaggcaaaactataacctatggtggaaaaaaatcagagcagtgcttgcctctggagttcggggactggctggaaaggaacatgcaggaactttctgggatgatggggtgttcggtattttttttttttttttgagatggagtctcactctgtcacccaggctggagtgcagtggagcgatctcagctcacactgcaacctcagcctcccggcctcaagcaattctcccacctcagcctcctgagtagctgggatgacaggcacaccatcacacccagctaatttttgtatgtttttgtagagacaggcttctgccatgttgcccaagctagtctcaaactcatggactcaagcagtcctcccgcctcggcctcccaaagtactgggattacaggcatgagcccccgtacctggcctgagttctgtattttgacaggcatttggtttttcaggggtatgtatttgtcaaaactcagtgaatttatacctgagatctgtgcattttattgtgtgtattttacattcttctctcaaaagaacaaatattaaaccttagttaatgatatgaagcattaagagggcagtggacagataatctataatttattttgaaatgcacaagaaaagatggcttgatggatatgggatacagccacacctgtgatacagcaggcatgataaaatgtcaatggtagaatctaggaggtggggataggggcgcttgttgtgaaatctttcaactttgctctatgtttgaaagtttttgtaataaagtgttggaaggactgtagtaaaattgttttttgtttgtttgtttgttttgagatagagtcttgctctgtcacctaggctggagtgcagtggcatgatctctgctcactgcaaggttcgcctcctgggttcacgccattctcctgcctcagcctcccaagtagctgggactacaggtgcccaccaccacgcccagctaattttttgtatttttagtagagacggggtttcaccgtattagccaggatggtctcgatctcctgacctcgtgatccgcccgcctcggcctcccaaagtgctgggattacaggcatgagccacagcgcccagcctgtagtaaaattgtttaaaaagatgatactgggccgggcacggtggctcacgcctgtaatcccagcactttgggaggccaaggcagttggatcgtctgaggtcaggagttcgagaccaacctggccaacatggtgaaaccccatctctactaaaaatacaaaaattagccaggcatggtggtgggagcctgtaatcccagcaacttgggaggctgaggcaggagaattgcttgaacctgggagacggaggttgcagtgagctgagatcatgccactgctctccaccctgggctacagagcaagactccgtctcaaaaaaaaaaaaaaaaaagatgatactgggtaccaagagggtgggggctggcaccatggggatctgagtattagggagaggagaccaagttcagttactgcagggaaaaatgcttattgagcatctactgtgtgccaaaccatgttctaggtactggggacatagcatcaaacaaaacacaaaaatccctgccctcatggaactgatgtcacaggtgacatggataagtgataaaatatatatatatatatatatatatatatatatatatatatatatatatatatatatatatatatatagtggctgggcacagtgactcatgcctgtaatcccagcactttgcgaggccaaggtgggcagatcacttgagcccaggagttcaaaaccagcctgggcaacatggtgaaaccccatctctactaaacaatacaaaaattagctgggcctggtggcacacacctgtagccccatctactcaggaggctgaggtgggagaatagcttgagccgaggaggtcaaggctgcagtgagccaagattgcaccactgcactccagccctggggacagagcggggctctgtctgtctctctctctctctctatatatatatatgtgtgtgtgtgtgtgtgtgtgtgtgtgtgtatacgtgtatatatatatatacacacgtatatatgtatgtgtatatatatatatatatatatttgaagaaataaactacataacatgtcaagtgtaagtgccaaggtaatattaacatggtgtaaagtgggtgcaggggtgctcaaagaggatctcagtgagaaggtgacacaggagcagagagcagaaggaactgaggggcaagacatggggagacaaggtacagtgtgcagtaagtactaaggcacttaggggagcttggcccattggagagtcaaaagaacaatgcaggaatgggaggcattcagggccctactgctctgataaaaacgtttcgttttgctgtgggtgagatgggagccatgggttggttttgagttttcgtgtggatgttatctattgcaataaaacatgccacccccaaaactttgtgggttaaagcagtggcagtatattttttctcttgattttgcaatcaggactgggttcagctggctggttcttctgcttgatgggcttccattagggtagggatgtccaagatggttccttcacttaagatgtctggcacctcggatgggatgattctaatggctggggactgtctggcatctctttcttcacacagcctgtccacatggctgacttgggcttcctcataccatggcaggatcacaggggtcaggcttcttacatggtgttaaagcaaactaaatatggcccgagaaggattctatacttctatttttgagtccttgtggacaagctataacctagcttaataggcagacaagatcgaaaacctaattcaaactgtgttcaaataaggcaaacaccaacatgtaaccaatcctgctgtttctgtacctcactgctgatttttgtatgtcacttcccgtttttgtgtgtgtgtgtgtgtgttttggcgatggagtcttgcactgtcgccaggctgtagtgcagtggcgcgatctcagctcactgcaacctccgcctcccaggttcaaggattctcctgcctcagcctcctgagtagctgggactacaggcatgcaccaccacgcccagctaatttttttatttttagtagagatggagtttcaccatgttggccaggatggtctccacctcttgacctcgtgatccacccgccttggccttccaaagtgctgggattacaggtgtgagccactgcgcccagccacttccctttttttttaatctataaatttgttctgaccaggaggcatccctggagtctctctgaatctgctgtgattctgggggctgcccaattcacaaattgttcattgttcaattaaactttaaatttaattcagctgaagttttaaacaatggcggctggcttctaacagggaggcggtgaatcctgccatgtctcttaagggctacacctggaacttgtatcacatcatttgtgctgaattctattggtccaaccaagtcgtaaggctagcccagattcaagctgaggagaaagagatcccatctcttgatgggaaaggtagtgggctcatagggcaggagaactgatagcaatcgtcttggataccatgccccacagtgtgccctgtggcaacagctggcagagaaaagacctgaagagtctaaatctgtgtttctctggaatggacacaaccatctctgcccctgggacgccacaagagcatcagccaagggctcagctatgagatgggcacttttgtaatccagagatggcagcaacaatattcattatttttaactcaaggaggattaaattcagttcccaaattcatggttatggtttcagacaacaggattttcttttttattttattttattttattttttgaggtggagtctcactctgtcacccaggctggagggcagtggtgtgatcttggcttactgcaacctctgcctctcgggttcaagcaattctcctgactcagcctcctaagtagctgggattacaggcacatgccaccacgcccaactaatttttctatttttagtagagacagggtttcgccatgttggtcaggctgatctcaaactcctgacctcaagtgatccacccgccttggcctcccaaagtgctgggattacaagcatgagccaccgcacccagcccagacagcaggatttttgatgaaatcgccccagaaaactggagtcttgactccaaattagcctttaccttcccagggagaggacgagtggggacattattgcttctaaagtggggagctgggggatggggcaggggcatacaagagatggggacagggcttggtgtgggagggatatttgcagtgctgttgcctgggctcaccccacccccagcccctgctgtcacttacaaccttcggctggttaattacctgttggggccttcacttatgtacctgaaaatagggatctcgttctcttagcattgtcatgaaaacctctataagtcagtggttcccaatctggctgcacttttggaatcacttaggggaagatttgcaaaataccgatgccctggctccactcccagggactctgattccgctgttttggggtgtggcctgaagattgggatctttaagcactcccaagtgattctaacatacaagccaggctaaggaccactaggccaagccaccgggccagggcgttctgagccggcgctttagccagcggtcctgcagcgccccctggtggggaacacgagcgcgtcgcctgttgtctgtggaactctccttcctccctcctagccgcgtgtctcgggcgctcctctccctgcttgaaccgccggaggggcttgagcattcagcccctggggatggtgttgtagggaccagcgcgacatcgggtctaacccgcccgagggacaagggggtggcaatcagaggggccgacagaccggggttcgagctcttccccacctctgagcctcagtttcctcatctgagaaatgggatgaaaatttgacttcatgttgctccccagtgtcagccccgggagggtgcctgcccgacttccaccagggggccagaacctgaacaagagtggggacagttaggtgaggaagtgggatatatccaaacgtaaatgttttctatttatttatgtatgtatttagaaacggagtctgcctctgtcgcccaggctggagtgcagtggcctgatctcagctcactgcaagctccgcctcccaggctcaagccatcctctcacctcagcctcctgcccaactggaactacaggcgcgcgccaacacgcaagctaatttttgtattattagtagagacggggtttcaccatgttgggcaggctggtctcgaactcttgacctcaagtgatctgcctgcctcggcctcccaaagtgctgggattataggcatgagctgcccacctggccatgttttccatttaaaatcctcgttttagtttgcaattctctcccacccattctttggttttatgttttcctttcttcacattggtttcatttttgtgtttgtttttactcattttgcatttatttggttttggctacatgagaagctggtgaccctgtatttgggaagtccccaatatgtgaggattatactgaaggtgacacccaaaatttgggagcatgctgaggatgggtccttgcagagactgagggcaggggttgtcgggttcaaggtgtggccgtgggctcctgtcagctagtgtcacagtcacactaataggcacacacctacacacacagacttacacaggtgccaacacactcacaaaacacacaatcatgctcacactcctagtcacattctaacacacacatccagatacaccgacatgttcacacacacttgcacatccagcataccgattcacacacctttgcacacacatatgccacacccactgaaaccctctcacatgtccacacacaccatcaccccgaccctgacacacactcacacacacacactgacacgtcccctcccctagtccacccctaatcctggccacacaaatgcccattctttctccccaggatggggccaaatggtgttttcttggtcatccttggccgacctggcggcctgtcccaggcagccggacttactggaatctctgggctgtggtgtgcacaggagaactccagatggggcccccagtgaggaaggcctgaatgaggtggggcatctggctggagaccatcctttcctcccttagaccacaagagggcgaggccctccctctcctccgagccaggggcttcgccctggtattcccccacccatggccccaccccttatccaggcgcctccttatccccctctcagccctaggtctcccatccccagtcttcccccatcccacccatttcacccatggcagcacaaatttgcccctgttcctccccctgcctggaacctgctatggctccccagtgccctcaagacaacacccagcccttcaccatgtgctccagatctggaaagaaagctctggccaacccttctccctggtttcatccagtctaaagcacgtggactgggtcgggtgtccccttggggttgtcagttctctctcccccactggactttgagtcccaagagggcaggtccagtattgtcatggtcactgctgggtctccagtatggagaaggggctcgagaaggtttattaaacaaaagaaagggccgtgcgccgtggctcacacctataatcccagcactctgtgaggccgaggctggtggattacctgaggtcaggagtttgagaccaccctggccaacatggtgaaaccctgtctctactaaaaatacaaaaaatgagccgggtgtggtggcgcacgcctgtagtcccaactactcgggaggctgaggcaggagaattgcttgaacccaggaggtggagattgcagtgagccaatatcgtgccattgcactccagcctgggtggtgacagagcgagactccgtcttaccaaaaaaaaaaaagaatgaattcacgtaactgtttaaagggtggatgtattttccttttcccagagctgtggctcctcatgcccactagagggcagaaaaaatctagaattcaatgcatctaccatgtgtcctccctccaccaccaaaacgtgccccctccgcccccacctaaggagaaaggaataacaataacaatgtgaataactgctaatatcagccctactgcttgtcagacccctgttaagtgcttcacacacctgatctctaaatcaactgctagatgagacccagccaaggtagaggaggaggaaagcaaggatcagggagggtgtttaattttcccaagtcgcacagcatccaaactgcagataaacttccagctcaagcctctgtgacttcacagctctttgtcctgtttgtggcaaagtttctcaaaagagagagtggtgactgggtgttagaccccttgatgaggatggaggggggcagctcatgcaaagggggcctctagccaggcagccctccccactgccactgcccggggagcctgcacactttaaggcagattcttcatagccttaggggctaacctctgaaagtgtcacagcagcccagggatgcgggttctattattttatccctgtgatacagattaggaaactgaagctcaggaaaattgagggacctgtcctgggtcgcgagacatggaggtggcagaactgagatttaccctgcaaggggccttgccagggcaggacacagagacttcaaatgctaggaggaggaaatggaactccttccccagaagagggaaaagtaactacagggtgagggtctgggagaggagaacaaggacctattttctgatgaggaaagggcaggcttttgtaggtctgtatcccaggtttaggggagcccagggaacctcaaggtcttggaaattcttattttaaaaagaccctgaggtcaggcgccagtggctcgcgcctgtaatcccagcactttgggaggccaaggcaggtggactgcctaagatcaggagtttgagaccagcctggccaacacggcaaaaccctatccctactaaaaatacaaaaattagctgggcatggtggtgcacacctgtagttccaactacttgggaggctgaggcaggagaatcgcttgaacccgggaggtggaagttgcagtgagctgagatcgtgccactgcactccagcctggggtgcaagacacagcaagactctgtctcaaaaaaaaacaaaaacaaaaacaaaacaaaaaacaaaactgaagggtgcagactgaggaagagggaagtaacagtcaaattgtgcatttattagaaaaaacaatctaggtccctttggggaggctggaaaaaatgcccaggtaatagtaagtgaagaaaaaaaaaactggtagaaatatgtacatagaatgagtccattttggttaaataaataaattcataaagctaacatttattgcctcctaagacaggccagggattgtctgaatattttacaagggcttttgtcactaatcccataactctgaacgagtcccattttacaggcacagaggttgcacagagcccaggaatggcaaagtgaggtggcaaaccaaggtcttctgagcccagagcccaggctctcaacccctgtgccctgtgcagatcaccctgaacttgctcaatgtaccagccgtcatttcttcatagcagccccaaataaatacctaactgttcaattcctcatcaggtgaggtctaaacaacccaagtatttatgtcctaagaacttagtagccatggccgggtgcagtggcttggcctgtaatcccagctctttgggaggaaaggcaggcggatcacttcaggtcaggagtttgagaccagcctggccaacatggtgaaacctgggtgtgatggcgggcgcctgtaatcccagctactcaggaggctgaggcaggagaattgtttgaacctgggaggcagaggttgcagtgagccaagactgcaccactgcactctagcctgggtgacagagcaagactccatctcaaaaaaaataataataatacacttttttcaatttatgtgatgaaaatatttgatatgatgaggagacagttttcaaaaacacttttggtagcaccaaaacaaagtttgaagtcctctatcctggggccttgcggcttcttttctttcttttttttttttgagatgaagtctcaccctgttgcccaggctggagtgcaatgctacaatctcggctcactgcaaactctgcctcccgggttcaagcaattctcctgccctagcctccctagtagctgggattacaggagcatgccaccaagcccagctaattttttgtgtgtctttagtagagatggggtttcatcatgttggccaggctggtcttgaactcctgacctcgtgatctgcccgcctcggcctcccaaagtgctgggattacaggcgtgaaccactgtgcccggccgggccttgcattttctataaatgttcttacttagtttaaagcgagacgggagcgcaggacccagtcctgggaggaaatgaagtctcagagggaactggcaggcaaagcttataaagaccacagtgattatgccaaggtcaaggaaagggttggggagggcggggcaggctccaccttttgagcagggcagcggggaactcccccagccatctctgcgccccacagggatactcacacattaacacgcgtgtgtacaatgagactgtctgccatacaaatggcatcgtattctacgcgctgaggactgctgtaacaaactatcacagaatgggtggcttcaatgacagaaattaactttttcacaattctggaggccagaagtccaaaatcaaggtgttggataggttggtgtctcctgaggcctctctccttggctgtgcagacggccgtcttctccctgtatcctcacatggtcttccctctgcatggggctgtgtcctggtccccttttctcataaagacaccagtcaggttggattaagggcccacacatgggacctcattttactttttttttgtttgtttttgaaccaaagtttcgctcttgttgcccaggctggagtgcaatggcatgatctcggctcactgcaacctcctcctccctagttcaaacagttctcctgcctcagcctcccaaggagctgggatcacaggcatatgccgccacgccaggcaaattttgtatttttagtagagatagggtttcaccatgttgggcaggctggtctcgaactcctgacctcaggtatctgcccgcctcagcttcccaaagtgctgggattacagctgtgagccaccaaagcacccggcctcattttaccttaattacctctttaaagacccccatctccaaatacagtcacattcagaggtgctgggagttaagacttcaacatatgaatttggggatggcgatagcatagtatatggtaactctatgttaaacttccagaggaactgtggccacaggtaactctttaacagaaacttgcctgtgttttctttgtactcattctgccttctggagaattcctaggaacccggacaaaggtagttgggcacagtggcacatgactgtagtcaaacctactcaagaggctgagatgaagaatgccttgagccctgtagtttgagtccagcctgggctacacagcaagacccccatctctaaaaaaacaaagacaaagctaacctacaaattgttctcaaatgtaaagacacggaggctgggcatggtggctcacgcctgtaatccccaggccaaggtgggaggattgcttgaggccaagagtttgaaatcagcctgcgcaacatagggagacccatctctataaaaataaaaaaattagccaggtgtggtggtgcatgccttcggtcacagctacttgggatgctgaggtgggaggatcacgtgggcccaggaggttgaggctgcagtgagctgtgatcgtaccactgcacttcagcctgggtgatagagcaagaccctgtctcaaaaaaaaaaaaaaaaaaaaaaaaaaaaaaaaagacatgatagaaatatttaacaattacttgacttgatttactatgaaatatttaatgatgtattagttaactgtgattttgccagtttcttctgtattttgaaactgatactttttttctggttcaaaaatttttggaaggtgcttaagaaataactgttcctccccactgggcctgtggagacctgtagacaaagtactaaagtaactcagcacaaatgtgcaaagtctgtaaatttgggtctttgattttcatagctatgaagagctcagcatgactcttggtggttaagaggcaaattttgctatatttcctcttcctgctgcagctgtactattaataaaatcattctgaacagctttcctgaaatgtaaaaataagccaagatgtctattttgtggatttttttttattatatgtataagcacaggaaaaaacaaatctggtaggacctgcatcaaaaggttagcagggttcctctctgggctgggggcttaagggaggggtgtctgcttcagccatatattgctgttcacaacccgctagagtttaggggcttcaaacaatgacttactagcattcagagggttgactgcgtggttctgctgctggtctctccctcggtcacttgtgtggctaatgtcagctggtaataggctgattctcccccacacagcctctctgcattcacctgggctttcactattttgtaacccagctttagcttccttgcaagatggcagctggcatgcacgtgagtaagagtgggagtctcctggactcttaaggcctaggcttgaaattgacgcatcactctgctacattctattggtcaaaacaagtcacgaggcctgcccagaatggaggggaggggaagtagacccccctggtgatgggaggagtgatgcgtgtgtacagggaagggaggaattgttagtagccatctttgaaggctgctgacctccgtgtctttctttctgtgtttaatagtatgcctagaataataataccacctagaatattatataataatgcctagaatattatagaaaaataatatcagacgtattatttttatgatgatagatatttttttaaataatgcaataaattgtgggaaacttgttggttggaccaagaatctacagaaataagtgaaacctggctggacgcggtgactcatgtctgtaatcccagcactttgagaggctgaggtgggcagatcacttgagatcaggggttcaggaccagccttggccaacatggtgaaaaccgtctctactaaaaatacaaaaattagccaggcatggtggcaggcaattgtaattccagctacttgggacgcagaggtggaagaatcgcttaaacccgggaggcggaggttgcagtgagccgagatcgcgccagccactgcactccagcctggacgatggagcgagactctgtccctgtcccgccccctccaaaaaaaagacacagcaaaagaaaagacacagagaagaagagaaggccagagactggagccaagagacatcaagagcccccagaagctggaggaggcaagaaaggattctcccatagaaccttcagagccaacaaggccctgctggcatctttgttttgaacatctggcctccggaactgtgagaaaataagcgtctgttatttttagccaccaagtttgtgagaatttatgacagcagctctagaaaatgaacacagacatagacagagagagggagactgatctgaatgtagatggagatgtggatatagttgcagatagaggataagctaccaataaggatatagcagcccctatggtgtaggtatagattaggatagagctgtgggcgtagacatggatatagacataaacatcaatgtagacatagatattactgtggatatagacatagaaggagataaaatagaccttgaagggccgggcacggtggctcacgcctgtaatcccagcactttgggaggctgaggtgggcggatcacctgaagttaggagttcgagaccagcctggccaacatggtgaaaccccatctctactaaaaacacaaaaattagccagacgtggtggcccacgcctgtagtcccagctactcgggaggctgaggcaagagaatcacttgaacccgggagacgggggttgcagtgagccaagatcgcaccactgcactccagcctaggcaacagagcaagactccatctcaaaaacaacaaacaaaccgaaaaaacagaccttgaggaaagcttgaggaaggaatggggtcacctgggctaactatgggccattgccaacaggaggtcacagcagatgtcatggagacagcctcctacaaacgctccacagctaagctcttcaggttttctggaaaatcccaagtatcagaaattgctttcttggttgggcacagtggctaatgcctgtaatcccaacaccttgggaggccaagacaggaagattgcttgaggccaggagttcaagaccagcctgggcaacatagcaagacctgtctcttaaaaaaaaaaaaaaaaaaaaaagctttctttcactcctccagtcatcctgctcttttctagtttctggataatcaatttgacccccaaaatgtgaaaacacaattcattgttttcagtcaaaagttgtatttttcttttctttttgagacagagtcttgctctgttgcccagactggagtgcaatggcgtgattatggctcactgtagccttgacctcctggcctgtagtgatcctcccgtgttagtctgccaaggagctgggattacaggtgtgagccagggcacccagacttcagtatgaagttttctctcccttctcttacctttctcatataaatcctgttttgcttttgaacgttgacaacagtcctatgaccatctccctcccctttgcatgccagtgtccaaaacaaaatcagatccaatgaataaatatttaaaagtttgttgtcattaaaaaaaagtggggacagggcacaatccaggagacctcaacccaggtagtaagaagctcagaggcatgttgttacaggatggctgagaaagcaaaaatcaggaagtggtttaacctttacagtgactgtctatacagtggaggtttccagattgcacgggactggttaaaagcaatcctcttatatcatttggggaaggcaacttaagtttcgtttatgattatcagaggcatttgtaagaaataacctaagctggctgggtgcggtggctcacccctgtaatcccagcactttgggagactgaggcagacagatcacttgaggtcaggagtttgagaccagcctgagcaacatggtgaaaccccgtctctactaaaaaaaaaaaaatacaaaatacaaaaattagcagggcgtggtggtgcgtgcctgtaatcccagctacttggcaggctgaagcacaagaattgcttgaaccccggagatggaggctgcagtgagcagagatcatgccactatactccagcctgggtcacagagcaagattccatgaaagaaagaaagaaagaaagaaagagagaaaggaaaggagaaaggaaagaaagggagagagatagccgggcgtggtggctcacgcctgtaatcccagcactttgggaggccaaggtgggcggatcacgaggtcaggagattgagaccatcctggctaacatggtgaaaccccgtctctattaaatatacaaaaaattaggtggcgggcgcctgtagttccagctactcgggaggctgaagcaggagaatggcgtgaacccagaaggcggaacttgcagtgagccgagatcgcaccactgaactccagcctgggcgacagagccagactccatctcagaaaaaaaaaaaaaaaacaagggagagagattgagagagagatcgagatctaagttgagtttcgcttacattcaaaagtcagagtaccttaggttttgcttatgtggcctgattttgtcttcttggggaattctcagtccggatccaccccccctagttttgtgtgtgtgtgtgtgaaacagggtctcgctcggttgcccaggctggagtgaatggcacgatcgcagctcactgtagccttaacctcctgtgctcaggtgatcctgttgcctcagcctcgcaagtagctgggaccacaggcatgcaccactttgtgcagctaatttttttttttttacttttatagagatggagtcttgccatgttgcccaggctggtctcaaactcctgggctcaaggatcctcccaatttggcctcccaaagtgttgagattacaggtgtgagccactgcgcctggctccccccattttattttaacaactttccccttttgacatagcaagctgagggggtaatgaaatcgtatagcattactttctgggagtgctattggctgggacagatgggtgtatagtcatttttgatagctgcatagtcatcttagacatatgtggtagagtccttaggttctccaagttgtctaatgcagatgggtgtcattagttgcatcagtggctgttgagaggcattggaaacccttaagaggatgcaactcccagggaggttaatatcatgactaggaggagaataatatagccaagggttggaaaattcaccagaggagagattcccaggagccaagatgtaaccaactaaataaataaatggaaaaagtatcacctatctgataagatttacatctgttctttaaaatcctctgaagtgtgggcaaaaattcttgatatattaacacagaaatgacagcttcattcattatacctcctttttgggcagttagagtagctcagactcatacattttgtgaaattattgaagcaaggctagaaacctcggtttgtaagccttggaggaaattaacagtgtcattgaagtttttttctaaagttttagagcatttataatagccccttccttccttccttctttttctttttctgtttctgtttttgttttttgatatggagtcttgctctcttgcccaggctggagtgcaggagtgcagtggcatgatcttggaccactgcaacctccccttcctgggttcaagcaattctcctgcctcagcctcccaagtacctaggactacaggtgtgcaccaccacacccagctaattttagtatttttagtagagacgaagtttcaccatgttggccaggctggcattgaactccttacctcaagtgatccacccgcctcggcctcccaaagtgctgggattacaggtgtcagccactgtgcctggcccataatagccttttctaaatcagagacaccaatacaaggaattggagctctgtccaccaaaggaagtcagtgtcatgtgtagtgagagggttggtgcttcttggatttctctaacggtgctatcttctgaacaagtgagccaaggttggtggctttatttgtagagatagtttattgtatctgaatattgggagggattactgccaatccataatgaccacgactcctgtttggtgttggctgttgtggctgcccttctcctgtcattttgctcagtgcccgcgcctggcagtgctgtgatgccatcccagggttcccgggtgcccggtacctgacaggtgcattacctggtaggcgcatttctggtgcagtttcttctggtccttgtaccactgcatgagccccttcatgaaggtgattgtcactttgtcgtcctcaagcttgggtccgctgtactcaccctcgatggctggcatgtgaacaggggagacacgagagtcagcgaccacggccactgtaagggggaagggggtcttgctcccagggatgaggtggacctggctctggacacacagattgagagagggacagagcgagtgaagagtcccctctctggtcaggtctggcccagaggcctcttcctgacctccttctcttccttcacccgcccccctttaccctattcagttttatggcacttagcacgattcattttgtgacttgttcatcatcttatctgcctcctagaatatcagctccatgcggacaggaagggttttgttcatagctgtacccccagtgcctaggacagtgcctggcacataggagatgctcaataatcatctgtgggatgaatggctggaccttctcagcacctagaggtgaaccagacacagcctgtgggggcggggctactgccggcagagagggagggaggagaggatgacagagtggccaagaagccagcatggagaagggcccgggcaggggtgatgctggtgggtagggaaggtgtattagtccattttcacattgctgataaagacatacccgagactgggtaattcataaagaataagaggtttaatggactcacagttccatgtggctgaggaggtctcacaatcatggtggaagatgaaaggcacgtctcatgtgccgacaggcaggagagaatgagaaccaagtgaaaggggaaaccccttataaaaccatcagatctcgtgagacttactcactaccacgagaacagtatgggggaaactgcctccacgattcaattatctcccaccaggtctctcccacaacatgtaggaattatgggagttacaattcaagatgagatttgggtggggatgagatttgggtggggacacagccaagccatatcagcggggtgttgcagctcctgacctcgcccattgggaatcatgagacggagctttgggctgcggatggagcgccctggaacacaggcagaggagcgacagacagcagcctgggggcagaacaaggggctacccttgagcccacccccacccccagggaatggagaaggcccgtgtggaatgttctgggctggagcgtggagcatccaggcctgactcactcatgctctcgatgtccagcgagtccaccacggagcgcttgtgctcgtcgcctgcgatggcccgctcaaaggccttctgcttcacgatcttgttgcactcctggtatttcattttggcatccttgtcgtggggcttcaccttgaccacctgggtgggagggaaggggcgtgcacactgaggccgaggtgggggcacagcggctgtccccaggctgcccagccctggattccatgaacgcggaagtcaggctgcccgggcaccagtgctgatggtgcaaccctggacatgtttaacctccaagtcttggtttctgcaccccaaaactgtccatagctaagctgctcacaccggcacacttcatcaaccttagctataactacattaaaatcaaacaccttgcccgtctgaggaccatgggctcagctcctggtcccccgtgggaaccagtgcaggcagcgacaactccaggcttcccagccttggactccaggacttacgccagctgcccctcaaatcctcaggcctttggcttcggactgagaattacaccgttggcttccccagttctgaggccttcggacttgttctgagccacactccctgcatcccagggtctccagcctgcacacagcctcaggacttctccgcctccataattgaatgagccagttgcccaataaaccccttctcctatctctgtctacacatatcctgttgattctgtctctttggagaactctgattaatatgcttcctctatgaaacaaacagggctgttcctagccatctcccagcccctagggagatgaaacgccatggcatacctggccaccgcagggctcaattaagatgagctgtaattattattattattattactttgagatggagtctcactctgtcactcaggctggagtgtagtggcgcaatcttagctcactgcaacctccatattctgggttcaagcaatcctccttcctcagcctcctgagtggctgggattacaggcgcctgacaccacccccagctaatttttgtatttttagtagagatggaggtttcaccatgttggccaggctgatctggaactcctgacctcctgcccacctcagcctcccaaagtgctgggattataggcatgcgccaccgcacctggccaaggtgagttgtcattattcttcttattgttattcccacagccctggagcctggggctctgtgccttctactgcctgccagacagcgaggggcctgggccagcagggccgttctcctccgtgccagctcagtgccaggcccctctggctgcctgcccagccccaggactcctgagagcctggatccggggtcctggggggtaaggggcccctcccaaaggctgctgttgcccggaactctgacgcagcctcagcagcaacccccaagcaggctgctcccatcccagggaagtccaccttccaccccatcacccagctgagactgagcctcatcctggactcctcccgacccctcagcccccacagcccggcagtcacttcacttcttctgccaagtcggcctcctgaacatctctcagatccagccattcccttctcaccctccagccccacccagccctgacctggcctctcctgcccacgttcctggctcagcctccacctggcctcacagcctcttgtcctgcccttccagaggggtgttcctaaggcacaaacctgaccctgtcctttccctactcggaacctcccagggctcccagagcctcccgcagaaagccctggctctccccacggccctgcgtgatctgctccctgcagcttcatcataacccccacgcacacacactgcagccccactcaccgcctccatgctaggctccgctaacctctggaactttgccaccaggttctttctgcctgaaggccaaaaccatcaaccccctagggagacccccaggcatgcgtccagagacccagcatcccccatccctcgtccactatgtcaccccactgtgagagctgaaaggttgtttctgcccattcagggacagagcctaccccaggaggcccactagattctcaggcccaccagggcccatgagtggcaggacccacactgggggactgggagctgtgaccctctaggctaacggggaactatgggagctctgcctggggacacagggccccaggcctgggccagttcaagagatgagtggctggcagctcccagcagatcaccaggctggggacgaaccctgagggtgagagagactcctctcccaaactaggagtgggctagggtcctggactttgccccaacatccccctcccacgccctgcacgccttcagcccacaccattccacgctttcagcccacgccttctgcggcctccccgtcgggtccagcctcagcctcacccgtcccattcatccacatgacatcgcaaacttgaccctccccctcccttattccaaaattttctctagttccccagtgccccgggaacaagtcgggttcctatgaagccctgtatcccgcagtcccaccttctccccagtgttaagctctactcaggtggggttcctctgcctccccctaccgggctgtaaaccccccgggaaggtaggacctgggctgtttcagtccccatctaggcaggatcagaccctggtgaatgcatgtggagggaagaaagggaaagaaagggaggaagggacagaataagaaggggagggagggtggtgccctttaaaatcaaaacctctggtttcatctttcttccctgaactggctccccacgcccaccagagggcgctctgacccagcaaattcctcatacagcaacagcccgttctacacacaaaagggaattatgaaaataaggattgacaccaataatcgatacttaaagccctactgtgaccagtacctatgctaaattatccacgtgcctaaatcaacacagcaattctgagaatatcttataaatgaggaaagtgaggctcagagaggtcatttaactttcccagtgtcacacagcacataagctgcagagaagcttccagctctggccttggtaaccccacaaccttccgttccttggtcatagcctgacgtgaccaaaccacaatgccctctgtgcctggccctgccacctcctgcccaacccccatcccgaggctcagccacacccttccacccccagctccttagacatcctgttccccatttagtcactggaatcttagcccattggctgcctcgaaagcacttcttccctttccctacccccacctcccacaaatggtcacctcctcccttcagctcaatgtcacctcctctgagtaagcctgtcctgatccagggttagctccatctcttccgactcacctcccctaagaatccaggctttccctgcgctccaggaggcagggcttcagtcatcatcgtgtccccagagccctgcacaggcactacagaaagactgaatgaatgaatggatgagtgaagtctacggggttaaataaatgaacactcaatgagtgacaccctctccctctccctcagccagaaattgagacattctccaacaaacacccacagccaggaagagaagatcccggacccgctagccaagagtgcacgcttcaggctcccaggacccccaaaattcatcctgctgaggctgtcgggggatgctgccaggactctgttggaagccaaggccctagggctcctggagagggtcccatactcccttcagtccctccccaggccaggtacagtgagtctcactaatgccatcatgcctttagggcagagtctcctgctttccagcccagagtccacttccctctcctgaatgattcacctccatttctctccagagaatccccctccccactctccttccaggtgactcctacagggctcacccaatcccctgcccacccaagcctggccagtcagtacgcttcctccctccctggtcactgtgattggggcaggggcaagcacatgatccagttcatccaataggagtcagccctgggtccagggctaaattaatgaatgaaggaaccctagaaccagccatgcctgaagccaaagccacgctggactttttttttttttttttttttttttttttttgagacagagtctcgctccattgcccaggctggagtgctgtggcgcgatctcagctcactgcaagctccgcctcctgggttcacgccattctcctgacgcagcctcccgagtagctgggactacaggcgcctgccaccaggcctggctaattttttgtatttttttttttttttttagtagagacggggtttcaccgtgttggccaggatggtctcaatctcctgacctcgtgatccgcctacttcggcctcccaaagtcctgggattacaggcgtgagccaccgtgcccagccaaccctggtctttatagtaatatgagccaatgaattcctttttcactaacctgcttaaacatggctaacttgggtttctgtacttgggacctaaacagtcctgtgtatcccactcctcaaagcattctctgaggccccaagggaagcagggtggggggtggcttctcagtgtcctgccagtcagtacatctggctccaaatgctggaccaggagttagggggagagggaaagggtcttctggagtttttagaccttggcaccatcatttgccatattcctgagtcttttcaccttgttcctggggctctgggtctcttgtcaacagggaacaagatgacagctgcctggtagagacggtatcaccatccctggagcagatctgtctggaaggcatattctcaatccctgcatttgcaggacagacccaagcttgcacagaggtcagaccagcagcttagtcatggggtgggctgaagatacgaaacagctgatttttctctccattatgttgtccaggtggaagaagggatgaatgaatgaaccctggggctcatcctagggcctggggcttggctcaccatgacagtgttcccagacacggggtgcagcccaggaaagaactgaggccaccctgggggtgctggtgggacagttagcaagacatgaaagggacctcctgggtgtcatgacataataatttgcaggtgtcccaggggttcttcctgaagcccaaagattcccacctccctccaccagcaagtcctcacctgagcaccccgcctacttcccactgcacagcaggctccagcagggtcatggtagcagtggctgcccagaggtcgtggtttttcattttttgttctgttgcccaggctggagtgcagtggcgcgatctcggctcactgcaacctccgcctcccgggttcaaatgattctcctgcctcagtctcccgagtagctgggatcacaggtgcacaccaccatgtctagctaacttttgtattttcttttcttttctttttttaatttttgtgttttcagtagagacagggtttcaccaggttggccacgctggtctcaaactcctgacgtcaagtgatccgcctgcctcggcctcccaaagtgctgggattataggcatgagtcaccgcgctcagccagttgtgattttttactttattttatttatttatttatttatttatttatttatttatttatttatttttgagacagaatttcgcttttgtcatccaagctggagtgcaatggcgcgatctcggctcgttgcaacctccacctcccaggttcaagtgatgctcctgcctcagcctcctgcgtagctgggattacaggctcccaccaccacgcccagctgattttatatttttagtagagatggggtttcatcctgttggtcagactggtctcgaactcctgagcttggatctgcctgccttggcctcccaaagtgctgggattacaggcatgagccaccgtgcccggctggtggtagtttttttacctggatagaatctgtgcccctgcatcaggcccagcccgccgcacaaccttcactcagtctctgtttcacctggcccacactgggtcctaaacatcaaacttaccctagatctggagcctgatgccccagagggaggcccacccagtcccactgactaagcctggctctctgtgtgaggcctgtctcccagagtcacgaaagaccccagtaaacaaacaacatgcatagtctcgttttcagtgggcttcttataacaaaaaatgctctgtccctgcaacagcctgaaaacggttgtcatggaaacagcagtagccaatggaggagggagagacaggcccctcccagagcccaggcctcctgcggtgggtgatggggcacagaagaaccatcaggattaaggggcaacggggaggggggtgtccccatgtggctggagcgggaggagtttcctcatctggtagctctgagagggagccgctgctctcaaagggacccatgagcatccctggagaacagatccatagtctcctgcggatcctcagacagctctggggaggggtcctggggaaaggtcactgtgaacagctggccagcaggcatccaggacgcccgagccctcatccccactccagcattgccacattcactgaaactgggactctaagccctgcgggtggcttgccagggtgtcattgacaccgtgcactgcagtccatccctatctcaggctccctcctgccccaagatcagtgcccagtgggcggcaccatggccatgagccttttgcaggactagtgccaggggcctggacatggacgcgcacagggccctgctggtcaccgggatcctggagggcctggagcaggtggatgttgaagccgtcctgcagtcgaccctcctgcccctgggcacgttcgggctgcaacacatgaagggcttgatggataagaaggcccaggccgccctggtggagtttgtggaggacgtcaatcacgctgccatccccacagaggtcctgggcaaggatgggatctggagggttctgtggaaggaccatgcacaggacacgaggttcctgaggcagatgagacgcctgctgctggatgatgggcccatgcaggccgtggtggctgggacccccggggaggtgcccacccctcccgcttcaaagacccaggctgaggggttgggacagtcatggggaaggccggtgcccctcctggggctacaagcgatagtaacaagaagagtaggggtcacagaaatcgagccggaagctaaaagagggcccgagggacatgtccatttcccttggcaaagaaggaatccaaggaagttccccaggagagcttggacatcaagatcgaggaggcagatgagggggcttgagcagagatgacaatgacagcaggctgtacacagcgctccaggcagcagccagggagcaagttcacaagaagtggaccctctgaagccacaaagacgaggcaggtggtcctatggagttcttggccctgatgaccaggacagacaaagccaaacaggagatgatggaagaaagccctctgatttgatgcacttgaccatcaaagaaggcaggagcagtgactcccatatggtggctcttctggccaccagagacatacctgaatgagatgctgaagggctgtaaagcttcagaaagtgggcgggtgcaaccaccaggtcacagagcggggctggaggaccctgagttcctgactactgcggcctgtaccagcccttcagacaccaaaagctgccaggaggtgttgaaaatcgcttctgaggcggggtgcggtggctcatgcctgtaatctcagcactttgggaggccgaggaaggcagatcacctgaggtcaggagtttgagaccagcctggccaacatggtgaaaccctgtttctactaaaaatacaaaaattagctgggcgtggtcgtgggctcctgtaatcacagctactcaggaggccgaggcaggagaatcactgcagcctgggaggcagagtttgcagtgaaccgagatcgcgccactgtactccagcctgtgcaacagagcaagactccatcaaaaaaaaaaaaaaaaaaaagaaggaaggaaggaaggaaagaaagaaaggaaagaaagaaagaaagaaagaaagaaagaaagaaagaaagaaagaaagaaaaaattgcttctgtgatcgactctttgggctggaggaatgagaaagaaaaaacgatgccctctcgcaggtcttgtctgtcctgtccaaggacactgtggtcccgcggaaagcctgagatgacaggaaccttctggagtgcattttcaccttggcgcagccagaaccccctccctggaggaagaaggctgagcctggcctcctcagggtctggggcgaggattaaaagagacaaaaaggacaaaaagagcgaagtggctcctggagctggtggtgcgcatctggcggctcaggcattgctgcagccgggagcaccacctggggaagagggaaagaggaaaagggtggggaggtgggaaattcaaatacaccaaaggcaaccaagggactacgcagctttccaggctgccagtgaggacataaagtcgggaaaggcagctgcaggggcagcagtagcagagttcgaggacacagagagcaaggcatgggagcctgagggcaaggcgtccaggaagcccctggccaagagggcgcacacggccccccggggcctggtcttcaactgcagacacaagtgattctcccgcctcagcctcccaaagtgctgagatgatagacgcaagccaccgtgaccagtctggtgtccacttcttacttgtcccattccttggtctgaacacttaggttccacccatggtttcgtgtttggctcatctgggcctgctcagcatatgtgaacttcaacctgggggtccatggcaactgaaaaagcaactcaccattttattccacaaagttgaaccggattaggctggttctgaggttacatgaacaacaagttacctgctgtgactgtagtcccaactcactccctaccttggagggctgtcactgtgtttatctcagtaacaaagacccctgaagtcccagtgccttgcaacgattaaggtttcttttcttttttttcttttctttcttttcttttctttcttttttctttttgagatggagtctcactctgtcacccaggctggaatgcagtggcgccatcttggatcactgcaacctctgcctcccggattcaagcgatcctcctgcctcagcctcccaagtagctgggattacaggcccacgccaccacgcccagctaattttttttttttttaagtagagatgaggtttcaccacgttggccaagctggtctcaaattcccgacatcaagtgatctgcccgcctcagcctcccaaagtgttgggattacaggtgtgagccaccatgccaagcctaaaggtttattttcacatacatgttggtagtagtggctgtgggtcaggcagaagggagaccccctgtttggatcttttctgcaggggctcacagcatggccactcatacaacacagaccaatgcaagtcgcaagttgcctctttggggtaagaatgcatcccctcccgcaggggtaccccaagccacatggcgacagtcagggacctatatcctcctacagggaggcagcgaatggaacaacaaaataatctaacacatcgcccgcccccccatcagaggcaacacctcttcccatgtggctgatgagatcttgtctcctccaccagactgtgaccaccgtggggacagattttgttcattgttgtgtccccagtgcttggcatattgtaagaactcaatgaatatgtgttgaatccatgaataaataaacaagtaagtcttgcttttctgtctcatatctgactctccccaacccctctccccaactcaggcttcctagactcaaatcctgaatccactgcttaccacctgtgtgaccttggatagatacttaacttctctgggtctcaatttgtttatttgcaaagtgggaaggatactattttgtgctttatagggttgttattgtaacttatcacacacacacacacacacacacacacacacacacacacacaccctgtgcctggtatgtagagagtcttctataccaattagctgttgtgtttgtttgtttgtttgcagaggagggacagggtatcactctgtcgctcaggctggagtatggcagtgcaatctcagctcactgaaacctctgcctcccaggctaatgtgatcctcccacctcagcctcccaagcagctgagactacaggctcatgccaccacgcctggctaactttttgtctagacataggtctcactacgttacccaggctggtcccccaaactcctggactcaagcaatctgcctgcctcagcctcccaaagtgcgggattacaggcgtgagccacgcagttattgctgctgttgtcactgtggggaagtggccaagggcacaggtttggagccagagggtcctggtctgagtctcactctgccacgtgttatgtttggcctcaactccctgagccttaacgtcctcacctgtaaaactcaacctcaggacattcttgtgaatttcaggcgtgattttttacgcaaagcatttagcatgcccctggtgcgatgtaaacacaagccatagctatgaggatgtaggaacactgtgggaatcctgcgtgtgttgatgactgcgtgtggagcgcccctgctggacaatcacagaacagcacgactgccctgaccggagacctctctaccccagcatcctcaactgtaaaattataataacagtaatgccaatatgagattgaggattcgttgagttaatacatgtaaagtttctcgagtagcatgatgggttaaagatgagtacaaattccttatccttctccccatccagaggtggagtttatagaatgagatggaagtaacattgttactgatgtgggatgtagacttcaagaagactggcagcttctgcttactgactcttagaacacttgctgttgggacactgtccctgagaacccagccaccatgctgcggaagctcaagccacatgcagaggctatgggtagttgctacagttgacagccccagttgaaatcccagccaatagtcaacatcaactggcaggcatgtgagtgccccatcttgggtgttccagctcatcttgggtgttccagcccccatgtgactgcagcccaaccaacattgcaggaagcagggaaaccgtcctgttgagccctgttaacccacagaatcgtaagagacaataaaataattattgggttttttttttttttagataaggtctcactctgtcaccaaggctggagtgcagtggtgcgaccatggctcactgcagcctcgaccgcctggactcaagcgatcctcccacatcaatctcccaggtagctaggactacaggtgtgcatcaccacacctggataatttttctgtacttttttgtagagacagggtttcaccatgttgcccaagctggtcttgaactcctgggctcaagtgatccacctgcctcagcctcccaaattactaagattacaggcgtgagccactgcacctggtcaataattattgtttaaaccacaacattctggggtagtttgttatgcagcaataaagagctgaaacaaataatatctagaacatagtaacaataagctgctattattatgtcattcaatcttcacaacaactctgtaagattgacatcaatagtacctgtattagtctgttttcacactggtgataaagatatacccaagactgggcaatttacaaaagaaagagttttaatggactcacagttccacgtggctggagaggccttacaatgatggtagaaggtaaaagtcacgtctcacatgatggcagacaagagagtgagagccagggaaaaggggttttcccttataaaaccattagatctcgtgagacttattcactaccatgagaacagcatgggggaaaccgcccccatgattccactatctcccactgggtccctgccacaacatgagggaattatgggagctacaattcgagctgagatttgggtggggacaccaccagatcatatcagtacccagttctacagctgtggaaactaagactgcacccttaaccacactgtagcatttgatggaagttgaaggacctaaaatgggtttcttgtgtcaaaagatttagctgagggaatcaaatatatatagatctgtgatttgggcaggaaacagaaacccagaagccttttgggaagcacttcccaggagtataagatacatgcacagccgggtgtggtggctcacgcctgtaatcccagcactttgggaggctgaggtgggtggatcatgaggtcaggagatcgagaccatcctggcgaacaccgtgaaaccccgtctctactaaaaaaaaaaaaattatccgggcatggtggcgggcacctgtagtcccagctacttgggaggctgaagcaggagaatggcgtgaacccggggggcagagctttcagtgaggcgagatcgccactgtactccagcctgggcgacagcgagactccgtctcaaaaaaaaaaaaaaaaaaagatacatgcacttcccatctgtggaaaagttaacagaaaattgtgtgtatgcatggggataagttactcatctactggtggaaattttctttatttattattttatttacttattattattatttgagaaagctggagtgcagtggcttgatcttggctcactgcaacctctgcctcccagattcaagcaattctcctgtctcagccttctgagtagctgggattacaggtgcacgccactacacccggataatttttgtattttttagtagagacagggttttgtcatgttggccaggctggtctcaaactcctgacctcaggtgatccgcctgccttggcctcccaaagtgataggattacaggcatgacccacagcgcctggccagaaaattttttaaaacaagtttcagatacttagattctggcttcgttaaaactatggtttaaggctgggcacagtcggtcacctctataaccccagcactactttgggtggccaaggcgggtggatcacttgaggccaggagtttgagaacagcctgggaaacatggtgaaaccccatctctacaaataaaagaaaaaaaaattaacacacaggtactcttagctacttgagaggctgaggtgggaggatcacctgagcccaggaggttgaggctgcagtgagccgtgatcacgccactgcactccagcctgggcaacagagtaagaccctgtctcaaaaaacaaaacaaagcaaaacaacaaaaactatagttgaagctgttggcagctagttccaaagatattggtgggtgtattagtttgctagggcacatatactgggtggtttaaacaacagaaatctatttactcacaattttggaagctagaatctgagatcacagtgttggcaggattagtttcttctgcagcctctctccttggcttgcagatggccgccttctccctgtgtcttcacgtggtcttccctctgtaccatctgtgtctaaatttcctcttctctctctttttttttttttttttttgagacagagtctcactctgtcgcccaggctggagtgcagtggtgcaatctcggctcactgcagcctccacctcctgggttcaagcgattctcctgcctcatcctcccaagtagctgggactacagtcgcccaccaccacgcctggctaatttttgtatttttagtagagacggggttttgccatggtggccagcctggtctcgaactcctgggctcaggtgatccacctgcctcagcctcccaaagtgctgggattacaggcgtgagccactgcgcccggcctaaatttcctcttcttatgaggacatctgccatgttgggttggtgcccactctaaagacctcattttaacttaattgcctctctaaacgccctttctccaagtatagttatattctgaagtactggaggttaggacttcaacacaggaatttggagggaacacaattaaatttgtcacaatgggaaactcgggactggagggactgtgggcacaggtgtttcccaggcaggcaagggaaggttctaattaggttacaagatggtaaggtccatatgagcagaaacctatgttcgaattgttcacttctatgttcctgaattatactggcactgaggagatgctcagtaaatgtaaactgaatgaatgaaaaaatgaggccgggcgcggtggctcacgcctgtaatcccagcactttgggaggctgaggcgggcggatcatctgaggtcaggagtttgagaccagcctggccaacatggtgaaaccccgtctccactaaaaatatgaaatttagccggacgtggtggcaggagcctgtaatcccagctactcgggaggctgaggcaggagaatcgcttgactccgggaggcagaggttgcagggagctgagatctcaccattgcactccagcctgggtgacaagagtgagactcagtctccaaaaaacaaacaaacaaaaaaaaacaaataaaaacaaagaatggacattggatctatatatatcatgtttatttcctgggtgaattgtaagcaaaaagcttgcctataagacagaatgttaagcccagtggtcttgtgtggattctttctggaatgtaactcttcatcttgagactgtggttcctataaagtttgtttcaagtgtttattatatttaattattgcatttttttgagacagggtctcactccattgcccaggctggagtgcagtggtgcaaacatagctcactgcagccttggcctcctgggcttaagtggtcctcccatctcagattcccagtgttgggattacaggcatgagccaccacgcttagcaaagtcagtgctttcaaacataaaaaaaaaaaagcccgttctctcttgcagctgtataggaaggggttctattctgcatcatgaaattgctctaaataattagttttttcactttaggaggccgaggagggcggatcacttgaagtcaggagtttgagaccagcctggccaacatggtgaaactccatccctactaaaaatacaaaaaaattagccgggcgtggtggcaggcacctatcatccctgctactcgggaggctgaggcaggaaaatcgcttgaacctgggaggcgaagtttgcattgaaccgagatcacgccactgcactccagcctgggtgacagagcaagactctgtctacaaaaaaaaaaaaaaaaaaaaaaaaaatcaattttaatagagtggcacattgagaacataccctaaacattcattctgttctcccgtgcagccaggagctccagttaattttcctgttaccagcctcatttgttaactctgttcatttgtgtctttccttgaaaggataatttgaacaaaagagtctaagatttttttagaaattgttgcaatatctgaaaaaaaaaaaaaagaacctcccaaagaaacctgcattctgattggttgtcttccttgattatttgttgctatggtgaccaggaggttaaatagcatctctgtatttcctaaagaataaatactggttggttttctctggcaaatcagaaaaggatcatttctctccttccatgatcatgatgcaataaaagcctagggctcttctagatttatattttatcaaagaaagtgagagtcttgtcttatccaaattaacagaagcacttagtccagtgtccagtcgcttgagtggcggtggccactctcggaagggcaattacaaactgtactaatagtaagtccagcgcgccatctggtggccaattagagaatagcatgaccgtatctacttaaactaaaaggcgactcacctcccttcttgtctgttaaggctgccctagcaaattaatacaataagcttgttcctgttggtcttagtctgattgagaaagaacccttgactgctttgacccatagaatatgacagatgtgacactgtgctgggcatggcggctcacgcctgtaattccaacaccgagaagcagaggtgggcggatcgcttgatcccaagactgcaagaccaacctgggcaacacagaaagaccccaactctactaaaaataacttttttgttttgttgtgagacggagtttcgctcttgtcgcccaggctggagtgcaatggcgtgatctcggctcaccacagactccgcctcctgggttcaagcgattctcctgcctcagcctcccgagtagctggaatgacaggggtccgccaccgcacgtggctaattttgtatttttagtagagacagggtatatccatgttggtcaggctggtcttgaactcccgacttccacccacctccgcctcccaaactgttgggattacaggcgtgagccaccactcccggccaaaaatataacttttaaaaataggctggcgtggtggcccgcacctgtagtcccagctactcgggaggctgaggcaagaggatcccttgagcctaggaggtagaggctgcggtgagctatgatggcgccgctgcactccagcctgggtgacagaacgagaccctgtctaaacaaacaaacaaacaaacaaacaagtgacaccgccaggcctggatctacattttaagggaaccagcagattccgtcgtgatctctttggctcccaggctactgtgtaagaattgcaactccccagccgggcgcggtggctcacgcctgtaatcccagcactttgggaggccaaggcggcggatcacgaggtcaggagatcgtgaccatcctggctaacacggtgaaaccccgtctctactaaaaatacaaaaattagccgggcgtggtggcaggcgcctgcagtcccagctactcgggagactgaggcaagagaatggtgtgaacccaggaggtggagctttcagtgagcccagatcgcggccactgcactccagcctaggcgacagagcgaaactccgtctcaaataaataaataaataaataataaaaaaagaattgcagctcccctaagagcatggagctgtgagaaggcccaggagaattgaagcttccagacatgggagtgaagaagccatcttggaggtgggtcctccagccctcatcacatgatgccacgtggaacagaaatgaacatccagtcaaacccttttcacattcctgacccacaaaatcctgaacaagcttgggaattaagctattactgtgccattttttgttgttgttgtttttgttttttctttttgttttgttttgggtttttttttttttttttttttttggttttctgggttttatttgagatagagttctgctcttgttgcccaggctggagtgcaatggcactatctcggctcactgcaacctccgcctcctgggttcaagtgattctcctgcctcagcctcctgaatagctgagattacaggtgcccaccaccacgcccggctaatttttgtatttttagtagagacagtgtttcgccacgttggccaggctggtctcaaactcctgacctcaagtgatccgcccacctcggcctcccaaaatgctgggattacaggcgtgagccaccgcctgcggccattgtgccacttttatagaggaggagattgaggttcagaggcccagttgatggtccaagatcacacactgggaagtactggaaccagggttatgaaatcctgtctgcttggctgcaaagcctctactcttccacactgcattatttaggaagacagacaggctttgggcacgagcgtgggcctcactgaggggagaggggccttctggcctcagtaatatccctgttcccttctctgactgtcacttcccccttagagacagagtttctgcagagtggagtctcttctcacgcctgggagagtttgtgcaggagacatgagagctgaagatctggcaccacctttgccttaaagacaaaaggtgacatttgggaaaagcatgccactcttcgagtggtacttaaggatccatgggctgaatctgcctttttttccccaactgatttggcaaggaccttcaaataaatccagtggagcttcttggggcagcatggcccactctcaagagtttagcctttgagtcatgtgtggtggctcgtgcctataatcccagcactttgggaggccgaggcaggctcacttgaggtcaggagttcaagaccaacctagccaacatggtgaaaccccatctctgctaaaaatacaaaaatcagctgggcatggtggcaggcacctgtaatcccagctactcaggaggctgagggaggagaatcgcttgaacccaggaggcagaggtggcagtgaactgagatcgcactactgtactccagcctgggcaacagagcaagactctgtctcaaaaaaaaaaaaaaaaaaaagagagagagagagagaatttagcctttggactcgcacagatctaggttcaaactccagctttgctactgcagcctcagcgcacttatctgtagaatgggatttcaaaatgatgtctgcttctcaaagttgctttgagaatttgctgatattttgtctttaaaatacttcattgtgtgctgccttacacaaagatcagaatctctgaaaggacaggacaggaactttttactcactcactgcttcactcactgctgtatgcccagtgctttcaaaagcacctggggctgggcgcggtggctcatgcctataatcccagcagtttgggaggcagaagagagcagataacctgagatcaggagttcaagaccagcctggccaacatggcaaaaccccgtctctactaaaaatccaaaaaaaaaaaaaattagccaggcatggtggcgcatgcctgtaatcccagctactcaggaggctaaggcatgagaattgcttgaacccgggaagcggaggttgcaatgatccgaaatcaagccactgcactccagcctaggctccatctcataaaaaaaaaataattaaaaacagtaaaaataaataaaaagcactcagcgtgggattttcaataaatagttactgaatgagtaaatcaaaagcagtcaatgttacatatgatgatcagggcattttcagttgcaagcaacagaaatctaagtcaaactggctaaaggagaaacaaaaattcactggccatcttattgtaagacaatagtgtagcttaaacaataaaaacaaattgaattctctttcccatagtagctccggggtgaatgaccttgtgaggctgtgcgtgtggccatcattcaggaacccagattctttcggattgttgcttaaagtgtagtcccgagaccagcagcagcctctggcaattcataggaaatgcacattcccaggttcccccaagacctactaagtcggaagctccgggggcaggacccagaaaactgtgccctaacaaactctccagggaattctgatgcccactttgagagccactgacctcatgctctgtcagcatttgcataattgaatgtgccacctctgagtgacttggtgaaagggaaaaaagagaaagttcagagcaagacatttccttgaaagcaggtaaagtggaaattgcgcaagtcatgtccaactgcaagccactggggaggacccagtcatgtggctgcagccaacctcaagggaggctgggaaatgtagtccccagccaggcagccatgtgcctgaggagaagaggagatgggcttttgctgtccaaaggtttttgtttgtttgtgttaagagacaggacctcactcagttccccaggctggagtgcagtagctgcagcctcaatctcccaggctcaagggagcctcctgtctcagcctctcaagtagctgggactacaggtgcatgccaccatacccagctaatttttgcatttttttagagactaggtctcaacatattgcccaggctggtctcaaactcctgggctccattcacctgggccttccaaagtgcttggatgacaggcatgagccaccactctaagcccctgtccaaagcttaagactgctgcagccatactcctcagggtcccaaagtcttccttgttacctgaaagcagaaataaatagttctgaggtgccagcagttttcatggacacctccccaggtgatatgattaggcttcatgtccccacccaaatctcatcttgaattgtaatcgccataatccccatgagtcaagggagagacagatggagataattgaatcatgggggtggtttcccctatgctattctcatgatagtgagtgagatctaatggttttgtaaggggctctttcccctttactgggcacttctccttcctgccgctttgtgaagaaggtgccttgcttcccctttgccttcagccatgattgtaagtttcctgaggcctccctagccatgtggaactgtgagtcaattacacctctttcctttataaattacccagtctcaggcagttcttcacagcagtgtgaaaacggactaataggccaggcgcagtggctcacgcctgtaatcccagcaggggaggctgaggtgggtggatcatgaggtcagaagttcgagatcagcctggtcaatatggtgaaaccctgtctctactaaaaatacaaaaattagctgggcctggtggcacacacctgtaatcccagttacttgggaggctgaggcaggagaatcacttgaacccaggaggcggaggttgcagtgagctgacatcatgccattgcactccagcctgggcaacagagagagactccatctcaaaaaaaaaaaaaaaaaagaaaggaaaagaaaagaaaatggtctaatacaccagggcacggccaaaagggtccttaaaggttttgctccccagcatcagtttaaccacctggaaacaagaggccagaaattgctgcaggcagggaacagaggtcttatgctatggactgaattgtgtccccttatccccaaaattcatatgttgaagccccaacccccaatacgactgtatctggagataagagtctttaggaggtaattaggttaaataaagtcacaaggtaggatcctaatctgataggactatgaccttataagaagagaaagggccaggtgcagtggttcatgcctgtaaccccagcactttggcaggctgaggctggaggatcacttgagcccaggagttcgagaccagcctgggcaacagagtgagaccccacttctaaaaaaataaaaaatattttttttaaaaagagaagagaaagctgtctccctgaccatgtgaggacatagtgagaaggtggctgtctgcaaaccaagaagacagccctcctcagaacctgaacatgctggcaccctgatctcacatttgcagcctccagaactgtgagaaaacagaattctgttgtttaagccacccagtctgtggtattgtcttacggcactctgagctgacttaagacagtccagaggggagacattgttaggagaagaggcctctaagaaggtgaagagcgtgcctgagacccttcccagtgtagctccggcagtcctcagcctcagtcttccctgggtccttgtggatgacaaagaagcccccatcacaaagaagcaccattgattgggtctgcaaaagacccagtgggactcacaggagctcacatcagggtcactggagtcaagggcctccataccacaggctcaccacatctgggatctcaccactcgcactaaatatgggaataggaaacctcacccagtgtgggtcccaaggagcaggcttctagtctgggaaatcatgtctcttttgatggcactcgcagttcctccttccctggctctagtctacacttattactgtgctctacaaagccctgtgtgtctaactcctgcatagtaatccaagtagcagaaacactttctttttattaaaattcattctcccattcctccctttagtaataagatgattgtggctgcccaattagaaacaacatctgggctggtcatggtggctcatgcctgtaatcccagcactttgggtggccaaggtgggaggattgcttgagcccaggagttcgagaccagccttggcagtgtagcaagaccccatctctaagaaagaaagaaagagagagagagacagagaaagaaaaaaagaaacaaaacacctgccagccttcctgataactaagtaagctcatgcacctaagttcaagcccttatgagctcaagtgatgtgtacagcttctggtcagttcctataaataaagatgctggcccttgactgtcttcctttctccttcctggctggggaacaactacagcaggaacataactaaagagagaagccatttcttaaagatatcaaagccaattcacaagcctgaacaccctcatgaagcaaaagtgtctgcctgccccagaccagccacctacctttggatagagggagagagagagagagaaaaaagttcatcttagttaagccacagtctttcattagctattttcactgtcttaaactctcttttatatttttcttcttttattttctctgtgcctcagtctagatattttctagtggcctgacttccagctcattcatcctgccttctgctgtgtctaatctgttgttaaagcacattgactgaattccttgttattattatttgtataaatttaaggggtgcaagtgcagttttgttacatggatatattgcatagtggtgacatctgggtttttggtgtaatcattacctgaatggtgtacttcgtatccattaagtcatttctcatccctcgccccctaccaccctcccactcttcccagtctattatttcacactctatctgtgtatacacattatttagcttccacttataagtgagaacacggggtatttgactttctgtttctgagttgttccacttaagaaaatggcctctagttccatccatgctgctgcaaaatacatgatttcattcctttttatggctgagtggtattccattgtgtgtgtgcacacatacacaccacacacacacacacacacgcatatataattttctttatccagtcatccattgctggacacttaggttgatttcatatctttgctattgtggatagtgctgctgtaaacatacaagtgcaggtatcttttttcttttttttgagatggagtcttgctctgttgcccaggctggagtgcagtagtgcaatctctgctcactgcaacctctgcctcctgtgttcaagtaattcttgtgtgtcagcctcctgagtagctgggattacaggcacatgcaaccatgcccagctaatctttttgtatttttagtagagacaggatttctccatgttggccaggctggtcttgaacccctgacctcaggtgatcaagtgttggggcctcccaaagtgttgggattataggcatgaggccaccatgcccagctatctttgcctctttgatgtaatgatttattttcctttgggtatataccccatagtggaattgcagggtcgaatggtagttctatttttagttttttgagaaatctccatactgttttctgttttctatagagattgtactaatttacactcccaccaacagtatataagtgttccacttactgaattcttaatttcagttatggtacttttctactctagaattgccctttctctggtaaaattacccatcctttcatataatccctgcatgtttttttcttttgtcttgagcatattaattctagctatgtaagatccttgtctggtaactccaatattaagattatccatgggtctatgtatactatctgttttttctcttgcttttcagtcatttggtctcgcctctagcatgtctagctattgaatgtcaggcattgtacatgaaaaattgtacatactgccccagagaggaaattatctttatgcagatagagtggtgctcatcactttaattcagtcaaaaactgggctgaatctagactgggttgccattttggaaaggcaccatgcatatctagtttgcacttgctcatggattttcaacctggagcctgggttataacctgggggtccatgatcctggcagctcttgaactcttcttgtctcttcagcattgcaagtctgctgaaactctattctgcttttcagaggctttcttcctggcttcttagactctaccccatgtagcttcagagttctgcaatgtcctcaaacaggaaccagaaaatcattaggctctttttaacttctcctttccccaggtcctagtccttcaagtctaattttgtccttcctgctctttgggtgtctgagaaggattcttctgcccaactcttttgcccagatcttcagtctccttccccatacccagaagcatcaaatgccctggagacagaaactgcaaaatgttggctcagctcagctctctatactgttcccccatatttgagattttgttctcttgactcctagttgccttagcagctcaccaatgctttgaaataatcattgctgctttttacatttttaattggcatttcaaattactcctagcagcactattggtctttcataaacaatttcatcatatccagaatcatgggtcattgtattttgaggttttttggtattcatagcttagcctgtaccctgactaacacataacttggcacctggtagtggcactgcagtaacaaaaccctaaaatatgtgacattggcttaacaatcaggcaacaagtaatttaaaatacagatttttggctggtcatggtggctcacacctgtaatcccagcactttgggaggctgaggtgggcagatcacctgaggtcaggagttcaagaccagcctgggcaacatggtgaaactccatctctacaaaaatacaaaaattagccaggcatgatgacaggtgcctgtaatcccagctactcagttgactgaggtgggagaattgcttgaacccggcaggcagaggttgcagtgagcccagatcgcaccattgcactgcagcctgggcgacagagtgagactccatctcaaaaaaaaaaaaaaaaaaccaccaaacaaacaaaaaaacaaacaaacgaacaaacaaacagattttgcaaaccttgtggccaatgacccctatggggctgtgtaaaatcatttggtagaaaaatcatctgcaataacatggaagagagtccacatacttatgaaatctatggtttagggagctgttaaaaaataggattttttattgtagtaaaatatatataacataaaagttgctattttaaccacttttaagtgtgcaattaagtggtattaattgcattcacaatgttgtgaaaccatcaccactatctatttctagaacttttaatcaccccaaacagaactctgtaatcgttacttagggaataatttgttgttataatttttaaattgagatatcattcatctactacaaaattcacctcttttaaagtatacaatttagtgtattttatatattcacaaagttgtgcaaccatcaccacaatctaatgcttgacctttttcattgccctaaaaagaaaccccatacccgttagtaatcactctccattctcttctacccccaggccttggcaacctctaacctactttctgtctatgtagatttgcctattctggatattttataaagatagaatcatacattatgtggccttttgtgtctggcttctttcactgagcataatgttttatgggttcatccatgttgtatcatgcattcaaatttcattcttttattatggccggataacattccattgtatggatatcctaaaatttatttatctattcatcagttgggagacatttaggttatttctattttgggaatcttataaataatactgccctaaacattcatgtatgagtttttgtgtgaacatatgttcttgggtatatatctaggagtggaattgctgggccatatggtaactctatgtttaacttttgaagagctgccaagttggtttccaaagttgctatgccattttacattccccaccagcaatgcaagagaattataattttttccacatcttttccaagacttgttgttgtctgtcatttttattaaagccgtcatagtgggtataaagtatctcattgtgattttgatttgcattttcctaatgactaatgatgttgccttcttttcatgcacttcttgatcatttgtatatcttcttcgaagtaatgtctattcaaattattttcccattttaaattgggattgtttatattttgttgttgttgagttgcaagagttatataatatatatacatatttcttggatgctagactcttactatatatataatttacaaatattttatcctattcagtttgttgtctttttactttcttgatggtacccttcaaagtgtgaaagttttacaatttgatgatgtcccatttatctatttttttctgtagtagtttatgcctttcatgacatatttaagaaaccattgcctagtttaagatcatcaagacctactctatgttttcttctaagattgtatatttttagctgttacaattaggtctttgatttgttttgagttaatttttgtatatggtgtgaggtagggttccagctttattcttttgcttgttgatatccaattatcccagcaccattagttaaaaagactactccttcccccattaaatgatcttggcactcttgttgaaaatcaattgaccatgaatgtgagagttcatttctggaatctcaattctattccattgatctatatgtctgtgggtgaatggtttttaaaaggcaggatattgatgtattctggctacttcctgctgcttttaaaaaatcgtaagtcagaaatgctcccaggcaagaattgaccagttcacaaacaaaaatggacagaagtaaaattcagcaaaggaaagaggcattttctttctttagcctaacatctaaatgtattgtgagtctagaggcttggagtcttacagattgacaaggttactaaacaacaagagagagcctccaagcctttttgagaattgacattaagattttgtggccggaaaaggagaatcagaccagaagcaaaaatctgatttcatatattattgttccattcaagattgttgtttccaatggtctcaaatagctgctataaatatggagtgatcacaggaactatcaatggcttacagacaccttatggaagctcactgcaccatctgtaaagttgtcttgccaaagagtgagatttaaatttgattgagcttctagttctaaatactagtttacaggataaacagggaacagaggaatacattaagaaaccccacatggatgcagtcagcagaattcagaatgtggaaaagctataggagaaaatgacctggtttctccaaaaaataactgcaagaaattaaataatgatccatgctacaatatggatgaacctttaaaacattatgctaagtgaaagaagccagacacagaagcccacatattgtatgatttcatttatatgaaataaccataataggcaaatctgtagaaaaagaagaaactgagtggttgctggggctgccaactggcatgggctttcttttttgggatgatgaaatgttctagaattagataatggcaatagttggacaactctgtgaatatactaaaagccatcaaattgtaacctttaaatggatggattatatgatacatggattttctctaaataaagctatttaaaaatcacaaagaaaaaaagaaggggaggtgtattagttgaatgaaatatatgggctttgttttgatcctgattgaaaatgttttaaaattatgagacaattggacaaatttgaacactgactaaatacttggcgatattaagaaagtacaggccaggtgcagtggctcatgcctgtaatcccaacactttgggaggccaaggtgggaagattgcttgaacccaagaattcgtgaccagcctaagcaacatagcaagaccccatgtccacaaaaaaaaaaaaaaagaagaagaataaattagccaggcatggcagcatacgcctgtaattccagctacttgggaggctgaagtgggagaatcacttgaatcgaggaggtggaggctgcagcgagccgtgatcatgccacagcaccccagcctggggaatggagcaagaccctgtctcaaaaaaaattaagagaaaatatttttagtattgggggggtattgtaatgatattgtaattatgtttttagtagtagttatctcttggagatacatactgaagtgtttacaggttaaatactatgtctgaaatttgttttaaaataatccaatcataagggaaagcaggagtatatagatgaaatgagactgacatatattgacaatcattgaacataagaaggttcattatacattctccctgcttttggacagtttgaaatttcccataacaaaaagaaaaaataaaaatctaaatgcttaagaattatatctggaagagatctttaggggtgggactcataaatggaattgattggaagcaaatagaccaaaaacttaccaagcatttgaggaaattttcttactaaggaaaccataagcctgatctataaaagactaattgctcaatgtctcagagaggtgagttgacttctgaagagtccctgaagacatacagagaggaaatggtgcagaagcaatatcgaaagacataacatctgcaaatgtttcagaactgatgaaagacaccaatccacaaattcaagaagtctttcaaactcaaaataaaataaacacaaaggaaatcaaacacagacacattatagtaaaactcctaaaagacaaaggcaaagagaaaagtcttaaaagcagtcatataaaaaaaagggtagattaccttcaaaagaggaacattattaaagctgacagctgacttctcaatcagaagacaacgaatcatatttttaaagtgctgagaaaaagtaaatgccaacatagaacatatactcagtgaaaataggattatgacatactgtagtgccagcttaaacatactatataagattctttttaactttatggactcaaactaatactgagctatttaatgaataatctttgaacacctggataatgtataagtatgggttaatatataagattttaaaaagaaaatgagaaagaaaaacagactgtatcatgccatctggatgatgggcaaaaacagtaaaactagaatttgatgttttttctgtctttaaaatgacaaagggatcttaaagtattcagtctgctctcagcaaggcatagtaaaaaagttattctttactttctgtgaaatttgtccgggtagcagaggttcttgccttactaaatattcttgtttgagaagatttaacttttttttcctttttgctgaccttagtcatattgttgaattgtttattttttaaaacgtgcagtaaaagattgtcacttacaaaaagctaaattcccttatagttaccttctactttatttatttatttatttatttatttatttatttatttatttatttttgagacagagtttcactctgtcacccaggctggagtccagtggcatgatcttggctcactgcaacctccgcctctcaggttcaagtgactcttctgcctcagtgtccctagtagctgggactacaggcacgcaccaccacgcctggctaattttttgtatttttagtagagacagggttttgccttgttggccaggctggtctcaaactcctgacctcacgtgatccacccacttcagcttaccaaagtgctgggattacaggcatgagccaccgttcctggcctatatttactatttttttttttttttttttgagacaaggtctcactctgtcacccaagctgcagtgcagaggtgcaatcacggctctctgcagccttgaactcccagagccaagtgataatcccacctcagctgggatcacaggcatgcaccaccaatgcccaggtaattaaaaaaaaaaaaaaactgtagagacagagtctccctatgttgcccaggctgaactcaaatgatcctcctgcctcagcctcccaaagagttgggattacgggcatgagccactgtgcctggcctatttttgaatatcttgattgtcattatggttaatagggtagccaagctataattactcctttctcttaggcaattatgcacctattttagtcaagtgatcagtattttggacaattctttttgatgtttcctttcataaaatcagactataaattcagaaaagttaaaaatcatcaagatgtttgtacattcaaaataatctttggcccttcctggatggccaaagcaccaaagatctgttccctcaccttgtaacccaccataggaaatacacacacagggcaggatgctagaactcttaagtatatttgatatgctttttttttttttcaagacagagtctcactctgttgcccaagctggagtactgtggtgtgatcttggctcactgcaatctctgcctcccgggttcaagcgattctcctgcctcagctggagaatgttgcccaggctggtctcgaactcctgggctcaagcaatccacctgcctcggcctctcaaagtgctgggattacaggcgtgaggcaccacgcccagcctatatttgatgtgcttctgtttttaaaatgattctacaatagtgtaaaaacctccctgatttttgaacacacaatgtgaaaaatgctttcaaactaaaaagatgagttcagccttccttagattaattttgtgcattaaatgtcactattataaatatatctcagagactgtccacttttacaggatggtgatgtgtcaatatcttcagtgtccataatctgttcttgcccccaggagaaacattgatctaattctcttggaataattatatagtatgccctaatagagcattctgttttcttcttattagatagtattagtcactgtagtaaattccccatcattatttagtcctacaatcaataagtgacttctgctttcctttcatgctttcctgaaggttagctggaaactacaggccagaaattgggtcttggacaaaggaaagtcaaagtgcctcgatgaatagacaatacctgataccctgagctactgacacttcaagaaataggctcactgggttcaggttttcccatgtgtatgagtctgttttcatgctgctgataaagacatacctgagacatggtgatttataaagaaaaagaggtttagtggacttacagttccacgtggggctggggaggccttccaattatggtggaaggcgaaaggcacatcttacatggcagcaggcaagagagagaacttgtgcaaggaaactcccccttataaaactatcagattggctctctgctcctcccgttcaacagacagccgcatcttcttgtgctttgccagccacgtacgtccctgagacaccacagtgaagttgaagtccggagtcaatggatttgttggaaccgggagcctagtcaccagggctgtttttaactctagtaaagtagatattgttgccatcaatgaccccttcattgacctcaactacatggtctacatgttccagtatgattccacccatggcaaattccatggcaccatcaaggctgagaacgggaagcttgtcatcaatggaaatcccatcaccattttcgaggtgcgagacccctccaaaatcaaatggggcaatgctggtgctgagtccatcatggagtcgaccggcatcttcaccaccaggaagaaggctggggctcgcttgcagggaggagccaaaagggttatcatctctgccccctcttctgacgctcccatgttcgtgatgggcatgaaccacgagaagtatgacaacagcttcaagatcatcagcaatgcctcctgcaccaccaactgcttagtgccccagccaaggtcacccatgacaactttggtatcgtggaaggactcatgaccacagtccacgccattactgccacccagaagactgtggatggcccctccgggaaactgtagcatcatggccgtcggactctccagaatatcatccgtgcctctactggcactgccaaggctgtaggcaaggtcatccttgagctgaatgggaagctcataggcatggccttccatatccccactgccaacgtgttggtcatggacctgacctgccatctgggaaaaccctgccaaatatgatgatgtcaagaaaatgatgaagcaggcattggaggaccccctcaagggcatcctgggccacagtgagcaccaggtcgtctcctctgacttcgacagcgacacccactcttccaccttcaatgctggggctggcattgccctcaacaaccactttgtgaagctcatttcctggtatgacgatgaatttggctacagcaacagtatggtggacctcatggcccacatggcctccaaggagtaagacccccagaccaccagctccagagagagcatgagaggaacagagaggtcctcactgctggggagtccctgccacactcagtcccccaccacactgcgaatctcccctcctcacagtttccatgccgatcccccgaagagggaggggcctagggagccccaccttgtcatgtaccatcaataaagtcctctatgctcagccaaaaaaaagaacaaaaaaaccatcagatctcgtgagacttattcactatcacgagaacagcacaagaaagacctgcccccatgattcaattacctctcaccatgtccctcccacaacacgtgggaattgtgggagctacaatccaagatgagatttcggtggggacacagccaaaccatatcaccgtgtaaaccagcattgtcctcccaagtaaacacctgtgatattctgtaccagaagcagaaccagaatttccagagttctttctattccataagtagattatttcatgacgactaaccctgtatctgataaaaataaataaataaataggccgggcgcggtggctcacgtctgtaatcccagcactttggaaggccgagtcgagcggatcacgaggtcagaagatcaagaccatcctggctaacacggtgaaaccctgtctgtactagaaatacaaaaaattagccgggtgtggtggtgggcccctgtagtcccagctactagggaggctgaggcaggagaatggcatgaacccgggaggcggagcttgcagtgagccgagattgtgccactgcactccagcctgggtgacagagcgagactccgtcccaaaataaataaataaataaataaataaataaataaataaataaatattttttaaaaaaacagactcctatttacatagaacaaaatgaaactgatgaaggaaatctgcttgtggttatttttaatattattgagaattgctttacaaatgttctttctttttatgcgcataggaagaagctcttttcctttcttcgtgacccactgccaactctcaatttaacatttatacttgaggaaattggaatgaaagcctctcagtagtatttttccatctgactcttccaaattctggaaaatatatcctgtgtcaaatctcaatataaattataaactgtccgggtgcagtggctcacacctgtaatcctaacactttggaaggcaggggtaggatgatgtcttgagcccaggagtttaagaccagcctgggtaatacagcgagaccccatctctacaaaaaataatttttaaaaaatattagccaggcgaggtggcacacacctgtagtcccagctcaggaggctgaggtgggaagagtgcctgagcccaggaaatagaagttacagtgagccatgattgcaccactgaactccagcctgggtaacagaccaagactgtctcaaaaaaaaaaaaaaattgtaagctaacaaatcatcagagactgaaatattataataattctaatcagaatgcagatgaatgcatttatgatgggtaaggcttagaaaaattataactgctccttagcaaagaacattggttgtgcttgaattttatggttataatgtatcaataaataactgaaccatatttatatatattatatctggaaagatccataatgattctgataaaaatatgaaaaacatcaactgactaagtagtcggtgcaactacttagaataatgggtagatattattacaaataacttcatcctttctgacaatgcagaataacttcatccatcctgacaatgtagcattttcatgagtttaatatgcattggctcccattgttgcaaggatatagacaaatcaaatgtactaccaaggctatactgacaatatcgtatgtgagaataaagccagttaatctagtcagaaaagcccaccattatggaacaaaggctgatgtgtagaacttcatttgtagaaccagatcctacaagccctcccaggaaattaaaccagtatatatgctgtggtttacaggatctcagtccagacttaaaggatcttgaaggaggaagaattcacccataaaagtaggcagcagggtgtggtggctcacgcctgtaatcccagcactttcgaaggcgatcacctgaagtcaggagtttgagactagcctggccgcatggtgaaaccccgtctctaccaaaaaatacaaaaattacctgggggtggtgacacatgcctgtgatcccagctcctcgagagcccaaggtgtgagactcgcttgaacccaggaggcggatgttgcagtgaaccaagattgcgccactacactccacctccaggtgacagagggagactccgtctcaaaaaaaaaagtaggcagtaaaagaaagttctattcgttccagactaatagagtccagtccaaatatacaactctagattccttacataatatccagacagaagctaattctctggttttagcagtgctcaccaccacataattctagatttactaaccatacaacaaggaggcctctgtgtgcaattaacacctcttgttttatctatgtaagtttaccaagccaaataggacagagcctacgctatataaaggtacaattcagagaccacatgaaatagccaccactgagtctgtgtactaatataaatgatatacaaacattattgatcattgggattgggaatatatgccacaaactaagctccaatttgttttctatttcccgtaacatttgtgagttatccgatattttaattaagaatagtacaaaccagaatcagaccaaccccttattttatcaatagctacctttagagataacatgatttcaggagctctgtgcaggaaacttattcaacacttggaaaataagacttaaaaatgattttcgtctggcgcagtggctcatatctgtaatcccagcactttgggagccgaagcaggtggatcacctgaggtcaggagtttgagaccagcctggccaacatttcaaaaccccgtctctactaaaaatacaaaaattagctgagcatggtggcgggcgcctgtaatcccagctactcgggaggcctgagacaggagaatggtgtgaacccgggaggcggagcttgcagtgagccgagattgtgccactgcagcctgggcgacagagcgagactctgtctcaaaaaaaaaaaaacacaaatggaaggaaggctggggctggggttgtggggcccaccccgtgtacactccacgtggcccagctgagagctcctcaggttgactcagagcacaggcagacaacaggtatcctaatttgcttccaacaccaaggccctggcgtatttcagaaaacctcggaaacaaaccctaaatgctcagcatttggaggcactaaaaacatgcacaaaacacacaagcattgagtgatttatttgccatgatctcttgctgctgttcagatccaagagacctcagggagaagggctgagcaggcaggggtgtccatccggccaccgcctctccctttcctcttgagggctctggggggtgttggactcacatgaataatcccagatctgaggacgctgacactgtcactgatgggacagaaagcagtcacgagaccaagtctgggctctcctggggcttccggtctactaggataagtggaaactaaataaacaactagaaatgcaatcatttcatggagcaaaaacacatgctaccaggaaagtccaactaggtgatgtggtggaaagtgactgcaggaggactctgctttaggtagcagggctggggaagttggtgacacctggcaggaaggaatacaaaggaatacaaaggaggtagccatggtgggcaaggggagtgacaagaggagaggcccaggcatggagaagagaagagaaagtgaaagtgcagagatttttgtttgtttgttttttgttttttgagacggagtcttgctctgtctcccaggctggagtacagtggtgcaatctcagctcactgcaacctctgcctcccaggttcaagcaattctccagccttagcctcccaagtagctgggattacgggtgcacgccaccatgactaattttcgtattttttgtagagacggggtttcaccatgttggccaggctggtctccaactcctgacctcaggtgatccacctgtctcggcctcccaaagtgctgggattacaggtgtgagccaccacacccggccagtacagagctctttagtgaagaaattggaggacttgaggatctgagagaggccagaggacagcccccagtgagcaagactcagtgagttctcaacttgaggcaggaagagatcaagatatagaggctcctattttatttcatgcataagacagagccttggagagtcttcaacaggggtgacaagacctggattgtgctttttttttttttttttttgtagagtctcactctgtcacccaggctggagtttagtggtgcaatctcggctcactgcaacctctgcttcccgggttcaagcaattctcctgcctaagcctcccaagtagctggaattacaggtgtgcaccaccacacccagctaatttttttgtattttttgtagagacagggtctcactgtgttgcccaggctggtctcaaactcgtgaactgaagcgatccacctgcctctgcctcccaaagtgctgggattacaggcatgagccatcatgcccagctggattgtgccttataaaagtccctttggctgaatgtagagagaaaatttgaggaaagcaggggtggaaatgagtggccagattagaaggctgtttgctcaagcaggagagagagcatcgtggcttgggtgagggtagggggagagggaggtagattcagatttgggattgattttggaggcatgactaacctgtgttctcacgaaaatggatttgtccccagagcaactacaagtctatgtgacatcaaggttcataagacaggagaatcaccaagggaaaaatagggccccaaccaataagacaaaaggaatagatgtaaggagaattggaacagggccctaagatctagaagtgctggtgttggaggtcaacagagtgtcattcactttgtcagccagcatttccacccctctggtttggtgtcagtgtttatctgctggctttctgcttcattcttagtcatcagcaccctcctttgtaccaccaggctagaagcctgcaaactatattgcccagcttcccttgtgagatggcttcccaataggttctgcttgcaggaagcaccacttctcaattctttctgcttctaggagggcctctggccacagccaaagaggtgaacaaggtcccagttcccactggtcatgaatttgtaatgtgtcaatttcattaagctgaaggaggtttcccacaagcctttccctatgcagctgaaagttagcatgggccccaggagacaacgtgcatgaatgtggaaggcagaagggaagcagaagccacatgcttttgtgttgggcaggtgggtgcaggcccaggcactgtggctgtcatgcacgttgtttgcaccttgaggctctccctggggatgtgaggcagcagccaggcccctacctctcccagctcccacaggatcctcctgcaggtacacatttaactccaaatcaaagagcagtgacttctcctggaagacatccgctcatgaaaattggagtcctggagactgtgagggtcccgtctgtctacatggcttcccactgatcctctcagttcgtcttccctggcttccccactttgtatcccatcttcccttcccaatacctgccctgctgacttcaggctgtaccagcagatgcagagagatcacccttacatagatggctcaaccagcttatgcaatgcatatggtcaaatccctatcacccatcccttatgaattgtgatattcagcttcctatatccatttacctagatgatatggtttggctgtgtccccacccaaatcttgtctccgaattgtagctcccataattcccatgtgttgtggagggacctggtgggagataattgaatcatgaggatggttcccccgtactgttctgtagtagtgaatacgtctcatgagagctgatgattttataagggtttcccctttcacttgattctcattctctcttgcctgccaccaggtaagacgtgacttttcccttctgccatgattgtgaggcctccccagccatgtggaactgtaagtccattaaacatcttttcctttataaattacccagtcttgggtatgtctttatcagtaatttgatcaaacactagtatccagttatttgatcaaacactaacctaggtgttgctatgaaagtattttgtacatgtgactgacatctactatcagttgactttaagtaaattatcctagataatctgggtgagcctgatccaatcagttgaaaggcctttgggggagcagaactgaggtttccctgaggaagaaggaattttgcttttgaatgacatcaactcctgcctgagagtttccagcctgccctgtggatcttggacttacctagccagcccctaaaatggcagaagcccattcatttgcaataagtaaatacataaatacataaatacatgtacacatatatgcatacatatatacatgtatgtatatatatgtgtatgtgcatatatcttagtctgttttgctttgctatcaaaaaaatacctgggctgggcgcggtggctcacgcctgtaatcccagcactttgggaggctgaggtgggtggatcacaaggtcaagagatcgagaccatcctggtgaacatggtgaaaccctgtgtctactaaaaatacaaaaaacaaattagctgggcatggtggcgtgtgcctgtagtcccagctactcaggaggctgaggcaggagaatggcttgaacctgggaggcggaggttgcagtgagccgagattgcgccactgcactccagcctggcgacacggcgagactccatctcaaaaaaaaaaaaaaagaaccaatctgagcctgggtactgggtaattcataaagaaaagaggtttatttgactcaccagtctgcagtgtgagggccacaggcttcttccactcatggcagaagtggaagggtagctggcatgtccaaatcacatggcaagagaatgagcaagagaatgggaagatgccagtctctttttaataaccagctcccaggggaactcttgcaggtgctaatagagagataactcactcactaccaagaggctgacaccaaaccaattgtgagaaattcacctccatgacccagacacctcccattaggtcccacccctgacattggggatcaaaatgcaacatgaggtttggagagtcaaatatccaaactccagcagcatatatgtgtatttatatgcatacgtgtatatatcatatctatatctcctactggttctgttcttctggagaaccaggactgatacctggatacgtatatgcatatccacatcttactcctcatcattctctttctctggctgacacctggctggtactttgctctcccagagcaaacccagagaagatattttattttgctggtatttcactttcctacttgctcttgagcatctgtcttttaaaagcttatatgagaactaacaactcttgttcatgcattcctgcatttattccacaaatctttttttttttttttttgagattgggtctcactgtgtcacccaggctggagtgcagtggtgcaatcttggctcactgcaacctctgcctcccaggctcaagtgatcctcctgcctctgcttcctaagtagctgggactataggcacatgacatcaggcccgctaatttttgcattttttgtagaggtggagtttcaccacgttgtccaggctggtctcaaactcctgggctcaggtgatctgcctgccttgacctcccaaagtgctgggattataggcatgagccattctgcctggcctactccacgaacttttgaacgccatgcacaaacatactctgtgctgtgctgtctgatgacacacaggttacaatactgataatggtccctaccctcacagacatcactgtccagtgatgggggaaagagagggagtggggagaagaatatttattagttatgtattagttatctactgccatataacaagtgtattagttatctactgccacataagaaattacaccaggccaggcattgcggcacatgcctgtaatcttggcactttgggaggccgaggcaggaggatcacttgagcccaggatgccgaggctgcagtgagccatgatcgtaccactgcacgccagcccaggcaacagagtaagacactgactcaaaaagacaaaaacaaaggcaaaacaaaaattacaccaacatgtattggcttaaaacaagaaacatttacgatgtcacaatttccagcagtcaggaatctgggtgagggtaactgggtggctttggctgtaggttcctcaaggctagagtcaaggggctggctggagctgcaggcatctcagggtggaaaatctgcctccagactcactcatggcagtgggcagccctcaggtccttgctggctgttggctggaggcatcagttccttgccccatgagcctctccccaggcagttcccataatggaagccccttccatagagcaagcaaggcaaggtggggaggaccagcaggacataaaccagtcttccagtaacctgtaccgggagtgacatcacatcacttctgccatatgctgtttgttagaagcttgtcactatgcccaatctacacacaaaggggtataggtcccagaagggcatgaataccacgaggctggaccactgcaggtcatcctaccataagtaaacatgttaagatgttaagataataaatatgaccatggctccacctggtgggaaacaatggcaaacagagtgacgaggtagaaagttctagttttaacagtttttttttttttttaaagaccaagtctcgctctgtcacccaggctggagtgcagtggtgtgatcttgatcttggctcactgcaacctccacctcccaggttcaagtgattctcctgcctcagcctcccgagtagctgggatcacaggcctgcaccaccacacccagctagttttgtatttttagtagagacagggtttcgccatgttggccaggctggtctccaactcctggcctcaagtgatccgcccacctcggcctcccagtgtgctgggattacaggcgtgagccaccactcctggccttagtttgaacagtttctgacttcatagttgtgttgccagataaagcaaggtcactcacatttatcatgaccaagtgagatttatcccagggatgcaaggatggttcaacatatgcaaatcagtcaatgtgatacatcatatcaatacaatgagggaaaaaaaccatatgatcatttcaattgatgctgacaaagcctttaatagaattcaacatcccttcatgataaaaaccctcaaaaaattgggtatagaaggaacatacctcaacataataaaagtcatgtatgacagacatacagctagaatcatactgaatggagaaaaactgaaagcctttcctctaagatctggagcaagacaaggatgcccacttcccccactgttcttcaacgtagtagtggaagtcctagctacagcaatcagaaaagagaaagaaataaagggcatccaggttggaaaggaagaagtcaaattatccttattcgcagataatatgatcttatatttggaaaagcctaagggcaaaagatcagaatagacatttttcagaagacacacaaatggcaaacaggtatatgaaaaggtactcaacatcaacatcattgaccatcagaaaaatgtgaatcaaaactacaacgagatatcacctcaccccagtcacaatggcttttatccaaaatatgtaataacaaatgctggcgaggatgtggagaaacgggaaccctcatacactgttggtgggaatgtaaattagtacagacactctggagaacagtatggaggttcttcaaaaaactacaaagagaactaccatatgatctagcaatcccatgctgtgtatatacccaaaaggaaggaagtcagtgtatccaagagatacctgcacccccatgtttgttgcagcacagttcaccacagccaagatttggaagcaagctgagtgtccaccaacagacatatggataaagaaaatgtggtacctatgcacaatgggtactgttttgttgtcgttgttgttattgttgttattgtttttgagacagagtctcaccctgttgcccaggctggagtgcaatggcacgacctcggctcactgcaacctccgcctcctgggttcaagtgattctcctgcctcagcctctggagtagctgagattacaggcgcacaccaccacgcccagctgattttttcttgtatctttggcagagatggggtttcaccatgttggggcaggctggtctcaaactcctgacctcaggtgatcctcccacctcagcctcccaaagtgctgggattacaggtgtgaaccaccatgcctggccacaatgggatacttttcaaccataacaaagattgagatcctgtcatttgcaacaacatggagggaaccagagatcattatgttgagtaaaatcagccaggcatggaaaaataaatgtcccatcttctcactcatttgtgggagctaaacattaaaacaattgagttcatggagacggagagtagaagaatggttaccagggactgggaagggtagtggagcagggggaagtggggatggttcgtagttataacaatgcagttaaatagaatgaataagttctagtatttgatagcacaacagggtgactacagtcaacaatacattttagggccgggcgcagtggctcacacctgtaatcacagcactttgggaggccgaggcggtggatcacctgaggtcaggagttcgagaccatcctggccaacatggtgaaaccctctctctactgaaaatacaaaaactagccaggtgtggtggcacacacctgtaatcccacctactcaggaggctgaagcaggaggatcgcttgaacccaggaggcagaggttgcagtgagccgagattgcaccactgcactccagcctgggtgacagagcaagactctgtctaaaaaaaaaaaagaaaaaaacaaacccatactttactgtacattttaaataactaaaagagtatatttggggtgtatgtaatacaaagaaattgtacatgcttgaggggataccccatttaccctaatgtgataattacacattgcatgcctgtatcaaaatatctcacgtatcccataaatgtatacacttactctgtacccgtaaaaacattttgggctgggcatggtggcgcacgcctgtaatcctagcactttgggaggccaaggcgggtggatcatgaggtcaggagatcgagaccatcctggctaacacggtgaaaccccatctctactaaaaatacaaaaaattagccgggcttggtggcgggtgcctgtggtcccagctacttgggaggctgaggaggagaatggcatgaacccggggggcggagcttgcagtgagctgagatggcgccactgcactccagcctgggcaacggagcgagactccatctcagaaaaaaaaaattttttttcaaaaagaattttttataaaaacatgtcacccagttaaatttgaatttcagataaacaacaaatacttttttagtatgagtatatcccatgcaacattttggatatatttatttaaaaacacctcattgtttatctgaactttaaatttaacttggctttctatctttttagttgctcagtgtggccaccttcctccagggcagcacagggctcaggagtggaggagccaggctagggactatggtaccaaaaccagccagcaggttagaggtgaggacgcaatgatgacaaactcctggagagggagacatggaggcaggatcagcaaaatgtcggggaagaggactgagcttttttttttttctttcttttgagacagagtctccctctgtcgcccaggctggaatgcagtggcacgatctcggctcactgtaacctccacctcccaggttcaagtgattcttctgcctcagactcccgagtacctgggactacgggtaagcgccaccacacctggctaatttttgtatttttagtagaggcagggtttcaccatattggccaggctggtctcgaactcctgacctcatgatctgtccacctcggcctcccaaagtgctgggattaaaggtgtgagccaccgtgtccggccctgagcttctttttaaacccataataaaccacatatttaatgtctttacattattgctgcctgagtcccccccatgagaaggaaaactccacaaaaaaacagggactgctgtctgatttgttcattgctgtgttcccagtacctagaagatgacttggcacctagcaggcgctcaagaaatgttgtctgaaggccaggcgtggtggcttatgcctgtcatcctaccactttagaaggccaaggtgggcggatcacctgaggttgggagctcaagaccagcctggccaacatggcaaaaccccgtctctactaaaaatacaaaaatcagctgagcatggtggcgggcatctgtaatctcaactaatcagaaggctgaggcaggagaattacttgaacgctgaaggtggaggtggcagtgagccgagatcctgccactgcactccagcctgcgagacagagcaagactccatcagaaagaaagaaagaaagaaagaaagaaagaaagaaagaaagaaagaaagaaagaaagaaagaaagagagagagagagagagagagaggaaggaaggaaggaagaaagagaaagaaagaaagagagaaggaaagaaagaaggaaagaaggaaggaaagaaggagaaagaaagaaaggaggaaagaaggaaggaaggaaagaaggaaggaagcaaggaaggaaggaagaaatgttggctgaagaaatgaatctttgagttgcttaaagaatctcagctctctggctcaggagtcaaggatgagaggaggacaggaggagatgagtctgctgggagagacagaggagtcatccctgggatggggatgtgagaggaacaggactggtgggggaagatgctgagatcaacttggacacggtgagtggaaagtacccagcagacatctggagagagacattcaggaatcccttgtctagccaagcctggagctcagagagagaactggcgtggtagacagaaaaatgccccctccaaggatatccacgttctaatccctagacttgtgaacagctttgctacttggcaaaatggactgtgcaggtgtaattaagctaaggctgttgatatggggtgattatcctagcgtacctgggtgggccattataaacacaatcctcacaaacacaatgctctttataagcgttatgggttgagtggtgtttcccaaaaagatatgctgaagccctctttcccagtccctcagaatgtgacctcatttggaaacagggttgttgcagatatgattaattaaatgaacataaagtcatggccaggtgcagtggctcaggcctgtaaacccagcacttcaggagatcgatggtagaggatagcctgagtgcaggagttctagaccagcctgagcaacatagcaagaccccctctctaccaaaaaaaaaaaaaatttttttttttttgacagagtttcactcttgttgtccaggctagagtgcaatggcacgatctctgctcacttcaacctccacctcctgggttcaagtgattctccagcctcagtctcccaagtagctgggattacaggcgcccgccaccactcccatctaatttttgtatttttaatacagacaaggtttcatcatgttggccaggctggtcttgaacttctgacctcagtgagctgcccgccttggcctcctgggattacaggcataagccacggtgtctggcctctacaaaaaaaaattttttttaattagctgagcgtggtggcacacacctgcagtcctagctacttgggaggctaaagcagaaggattatttaaaaccaggagtttgaggctgcagtgagctatgattgcaccactgcactccaggctggatggcagagcgaaaccctgtctcaaaaacaaacaaacaaaaaaaattcaaggtgttggcaaggccatactccctctgaaacctatgcccttatctctccattcaggtttcccatttatacctttggaatttgtagttattgatttccacacaattgcaaccaaggctgaatggggccccgggctccagccacagggctgggcatgacagccacactggaagtcatcagcacagagacaatgctgggaacatccctgagaagtgggagctcctgactgcccacacaagcaacagatgtcagccttgggcttttgtccttcaagctcaagtcatctctctgaccgtttcttgccagcctccccaggcacctcctcttccctcccctgagcatgatccgtggctgccctgtgcccaggccctcttgccatcttcacctgttctccccgatctcattcattctcaccacttctgtctctcattcctttccctccctgtgcatctctgtcctcagccccagtgtgttcaggtcttcttgctgctgtaatgaatgactacaggctaagtggcttaaacaatacaaatttgctctcttgcagttctgaggggtagaagtctagcacgggtcgcactgggttaaaatcaaagatgtgctccttctggaggctctagggcaggaatccccaacccccacgccacacactgtgatgtggtttggctctgtgtctccacccaaatctcatgtcaaattgtaatctccacatgcctgggggagggacctggtgggaggtaattggatcatgggcgcggtttcccccacgctgttctcatgatagtgaatgagttatcatgagatctgatggtttaaaagtgtgtgacaggccgggctcaggggctcacgtccataatcccagcactttgggaggccgaggcaggcagatcacccgaggacaggagttcaacaccagcctggccaacgtggtgaacccctgtctctactaaaatacaaaaattagccaggcatggtagctggcgcctgtaatcccagctattcagaaggctgaggcaggagaattgcttgaacacaggaggtaaggttgcaatgagctgagatcgtgccactgcactccagcctgggtgacagagccagactcctcaaaaaaaaaaaaaagtacatatatatatatatatatatatatatatatatatatatatatgatattatatatgagatacatattttatatatatgatatatatgatattgggaggccaggcacagtggctcatgcctgtaatcccagcactttgggagactgaggcaggtgaatcacctgaggtcagaagttcgagatcagcctggccaacatggcgaaatcctgtctctactaaaaattcaaaaacgtagttaggtgtggtggtgtgtgcctgtaacccccactacttggaaggctgagggtacaagaattgcttgaacccaggaagcggaggttggagtgagccaagatcacaccactgcactccaccctggcaacaaaatgagaccctttttctttgaaaataacttagaaattagctatgcaaagtggtgcaggcctgtagtcccagctacttgggaggctgaacaagaggatggcttgagcccagaaattcgaggctgcggtgacctgggatcacactacagcctgggtgagggtgagaccccatccctttaaaaaaaaaaaagaaagaaagaaagaaattaaaaacagccaggtgcagtggctcacacctgtaatttcaacaggttggaaagcagaggcagaaccacatgatgggaccttgtctctacaaaaaattaaaaaaaaaaaaaaaaagattgggtggcttaaacaacagacatttattttttcacagttctggaggctggggagtccaagatgaaggtgccagcagattcagttgttggtgaggccttgcttcctgacttgcaagcagacgcctttttgctgtgccttcccatggcctttccccagtgtgtgcacgtggagaacgtgagctctggtttctcttcctcttgttttttttctttctttctttttgagatggagtcttgctccatagcccaggctgaagtgcagtggcgtgatctcggctcactgcaacctctgcctccagggttcaagcgattctcctgcctcagcctcccaagtagctgggattacaggcacccgccaccatgcctggttaatttttttgtatttagtagagatgggctttcaccaggctggccaggctggccaggctggtctcaaactcctgggctcaagtgatccacctgcctcagcctcccaaatgttgggattacagggtgagccaccactcccagcctctcttcctcttcctataagggtactaatcctatcatgggggtcccagcctcctgacctgatctaaatctaattacctccaaagttccctgcctccaaataatatcacactgatggttttggcttcaagatatgaattcagagaggacacaaacattcagtctacaacactcaagcaagcagaaaatggtaagaataatatgatttctctttttcagtccattgtctgtgtgcgagatattcatgatcatacacattatgttcatatacatgatctcacttaccatgatcctgacgtagtaagttatctatcgctgtgtaacaaatcagcccaagatttactggttgatgtggtttggctctgtgttcccaccgaaatctcatctcaaattgtaatccccacctgttaagggaaggaggtaattggatcatggggatggtttccccatgctgttctcatgacagtgagatctaatgttttttgttttgtttttttttgagacggagtctcgctctgtcacccaggctggagtgcagtggtgcgatctcggctcactgcaacctgcgcctcccgagttcgtgccattctcctgcctcagcctcccgagtaactgggactacaagcgtccgccaccacacccggctaattttttttgtacttttagtagagacggggtttcaccgtgttaaccaggatggtctcgatctcctgacctcgtgatccgtccaccttggcctcccaaagagctgggattacaggcttgagccaccgcacccggccagatctaatggtttaataagtgtttgacagttcctccttcacatgacctctcatttcctgccatacaagacatccctacttccccttccggcattattgtctgtttcctgaggcctccttagccatgcagaactgtgaatcaattaaacctcttttctttataaattacccagtcttaggcagttatttatagcagtgtgaaaacagacaaatacactggtataaaacaacaatgggccaggcgtggtggctcatgcttgtaatcccagcactttgggaggctgaggcaggcagatcacttgaggtcaggagttggagaccagcctggccaacatgatgaaaccccgtctctactaaaaatacaaaaattagccaggcttggtggcgcacccctggaatcccagctacttgggaggctgaggtgggagaatcgcttaaaccagagaggcagagattgccgtgagccaagatcatgccactgcactccagcctgggtgacaggctgagactctatctcaaaaatcatcatcatcatcattatcatcatcatttgttatctcttgcagtgcctaggagtcaggaattcaggagcagcccagctagggagtggcagctctaggtctctaataagtttgcagtcagatagtggctgggtgtgggatcattttaaagctttcctaaattacatatctggtaccaaaggctccttggctcccttctctctccatagggtctctccaccatggtgactcagagctcccaaggcacaaatcccaagacagagagacccagggagtggctgtgtcaccttttctaatctagcctcggaaatcacttatcatctgttcatgagaagcaagtcaatagggctgcccgtattctagaggacaagaactggaatccacctttttattttttcaatttttaaatattttttttaggcagggcgtggtggcttacgcctgtaatcccagcactttgggagtccgaggcgggcggatcacgaggtcaggagatcgagaccatcctggctgacacggtgaaaccccgtctctactaaaaatacaaaaaattagccgggcgtggtggcgggcgcctatagtcccagctactcgggaagctgaggcaggagaatggcgagaacccgggaggcggagcttgcagtgagccgagataacgccactgcactccagcctgggcgacagagtgagactctatctcaaaaaaaaaaaaaaaaaaaaaaaaaaaaatatatatatatatatatatatgtatttttaaaatatatatttatttaatatatatttaatattttatatatatatatatttttttaatagagacagggtcttgctctgttgcccaggctggtctcctgggctcaaacaatgctcccacctcagcctcccaaagtgctgggattacaggtgtgaaccaccatgcctggccagaatccatctttgtataagaggaatttaaataaattgtagacacttattaaaactaccacagtaggtacttttttatgcccattttacagacaagaaaaccgaggcacagggaagctaagtaacttgcctaatgtcacataacttgggcttcacgcatggtggctcacacctgtaacccaatattttgagagtcagaggcagagggattgcctccaagaggcagaggcagcaggattgtaccaccaagaccagctaaggaggcaggaggattacttgagcctagaagttcgagacccgcctcagcaacatagtgagaccttgtctctacaaaaaaatgcttttaaaaattagccaggcatggtggtgcaggcctttgatcccagctactcggtaggttgaggcaggagaatcgcttgagaccaggaggtcaaggctgcagtgagccatgtacatgccactgcacttcggcctaggcgacagaggaaaaccctatcttaaaaacataagtaaattcatttaaaaattaaataaaatgcaagtctccaaccattaacaaagggagtgtcaaaaagtcatggaaaaaagggttttttaaaaaacaatttaaggaacataaagataacgtttaaaatgtaaaatagaagtgaatatattttttccctgcaactacactgaaagagatactgttttgcataataaaactgtctaaagaatctgtcctgataacgtaattgaaaatattcccaagaacgcctgtcttgttttgctgtgcggtcaggagccctgagttcctgtcaccacctggtctgttcatttaagacggtccttggaaagataattggaacaaaagaggcttgtgagattctcctagaaattgttgccaatcttgagaaaaataatctcccagagaagcctgcaattctgattggttttcttcctgatcatctgttgccatggtgacagccatcatctctctattattaaaaggaagaaatgactgtaggttttctctctctaaaccagaagacgatcgttggcacttttctcccacaaacataatggaaataaaagcctgtgactctgctagattttttcaaaaaaacaaagacattgagagtcctgtctcatttaaatgaatcaaagcactcatccccacgcacagatagacataaatggtggtagctgtgggcatcgcggttgtggtcggctgtcatcttcacttcatcagagcgcccactggtgggtaatgagagaacagcagggctatcccagctaggagacccccttccctcccttcctctctggagggttcaccaccccaaatagccaggcttgcagtggagggcagaactagggacagaaatccctggatattctaccaaggatgggaggatggcccctcctgctctcagcccccgtcatggtctcctattgtgtaccagacattgttctatcccctctacattctccatgctcactacaaccccttaagtggggaattatgactgccctacctacagatgaggattccaaaaccagagaggtttagtctcctgcccaaggtcacacataaactggaggacctatgagttattcaaacccaggtctctctgacagtaggcagagaacttcagcgtagagggaatgtggcgggactcaaaaggctcccaatccaccctcaagagagacttttcaggactgattgggtttatcagcaagaggcatccaacatccagctatctaataatcagggtgattcatggctaacagttattgagctctcatcaagtgctatgttctgggctaagtactttggatgtataatcccactaaatcctcctgacaaattttgggagaaaaattacgattgtgcccatttcacagaagagaagactgaggttcagagaggcccattatattgccccaggtcacacagctgggaagtattggagccaggtttgtaaactcgtgtttgcctggctccaaagcttctactcttctccagtagactatttagaaagaccagctttggatatgggtgtgggcctgactcaatgcagtaagtgctttctgggcccaagtaaaggccctgccattttccgatttgctgtttcgttttttgtattagttatttatggctgtataacaaatcaccccaagatccagcaatcccacaactcaatatacatacagaggaaatgaaatcagtatgtcaaagagatctccgtattcccttgttcattacagcactactcacaatagccaagatatggaatgaacctaagttgccatcaacagatgaatggataaagaaaatgtggtacatagacacaatggagtactattctgccttaaaaagaaggaaattttgttcctggcaacaacatagacaaatctggaggatactgtaagtgaaataacccagaaataagccagccaaataagccaaagaaaaacaaataccacatgatctcactcgcatggagattgtaaaaaagttaaagtaaatagggagtagaaaggtaatggttataggtggtggagggttgaggagatgttggtctaagggcacagatttttaattagataggaggaataagttcaagagatctattgtataatatggccactatggttaattacaactataattattctataattatctaattatactataatattcaagaatgtattttactcttgaaaattgctaagagaataaaaaatcacccccaaacctggcaacttaaaagaacaacaattatttattttactcacaaatctgcagtttagaggtttgtcagggacagttctctgctctgcaaggtgttagctgaatagcatcagaatctgctttgaagaagacaactactttcctagctattttctgggaagtgtgagcttgggacctcattcctattcatatgatcctttcctctggctccttgaacttcctcacaacatggtggctggattccaagagcaagcattctaagagaacaaggcatgtctttttttttttttttttttttgagacagggtctccctttgttgcccagactagtcttgaactcctgggctcacacaatccgcccacctcagcctcccaaagtgctggaattacagacatgagccaccatgcctggcctatgcatagcatttgtatgatccagctttggaagtcatatcatcgcttccactttattagtcaaggcagtagggactgctcaagctcaagggaagagacatagaccccatctcttgattctagaagcatgtggaataggagatattattgtcgctatctgtagaaagtaaaatctgacatactctcaaaggcagtgtagggtagactggaatatcccacttggtccctcgttgcccactctctgggaaaagggggatgttttactgcagaggatgggagggtgaagacccagcaaggtcttggccttggagctctaagaatccaagaatctaataatagttttagggacaagagggtcacttggagagaaggtgtctctttgggggatatttaaggatccatgggctggacctgccttttattaaataactactaaagatctctagataactcatggctagctctggaagaagatcctagacatagcacgaaggtcaagatcctagacattggggccaggtaggccaccgtcccagttccagctatctatgtattccttggtcactatctatgtattccttgtctgctgcagcctcagtttcctcatttgtaaaattggtataaaaataatatatagtacaggaccgggcacggtggctcacgcctgtaatcccagcacttagggaggccgaggcaggcagatcttgaggtcaggagatcaagaccatcctggcgaacactgtgaaaacccatctctactaaaaatacaaaaaaaattagccgggcgcggtggcaggcacctgtagtcccagctactcaggaggctgaggcaaaagaatggcatgaacccgggaggcagagcttgcagtgagcagagatggcgccacggcactccagcctgggcaacagagcgagactccatctcaaaaaataataataataataagtagtagtagtagaggttaggtgaagcctgagacctggtggtgtatgagccagagcagaatccagagtaaaacccagtattgttgttgcctcaggccctctgtggccagcatctatctccatctgtgccatcagtgcctgcccctataggggcactagctgttccaaccgggtcaccctggctgaattgaagataacttataaaaagccacatcttggctgggcgcggtggctcacgcctgtaatcccaacactttgggaagctgaggcaggtggattacctgaggtcaggagttcaagatgagcctgggcaacatggtgaaaccccgcctctactaaaaatacaaaaattagctgggcatggtggcacacacctgtaatccccacgtacttgggaggctgaggcaggagaattgcttgaactcaggaggtggaagttgcagccagccaagatcgcgccactgcactccagcctgggcgacagggtaagactccatgtaaaaaaaaaaacaaagagccacaactttaaagttgtggaaattggatgccattaacattgtcaacaaaagtttttgaaataccagccgggcgcagtggctcacacctgtaatcccagcattttgagaggctgaggaaggtggatcacctgaggtcaggagtttgacaccagcctggccaacatggcaaaactccatccctgcaaaaaatacaaaaattagcagggcatggtggcatgcacctgtagtcccagctactcaggaggctgaggcaggagaatcgcttgaacccaggaggcagaggttgcagtgagctgacaccattgtactccagtccgggcgacagagcaagactctgtcaaaaaaataaaattgaaatatctaagaataaggccaggtgcagtagctcatgcctataatcccagcactatgggaggccaagataggaggattgcttgaggccaggagttcgaggctgcagtgagctgcgattgcaccattgcactccagcctggataacagaacaagatcctgtctctaaaaaataaaaagaaaagtttaaaaaaaagttttttaagtgaaagacaaatcagatcaatgaaaatgaacacatgatatacaaaaacatatgggatacactaaagtagtgcttggaggaaaatttacagctgcaaattgcctatattgaaagagaaaaatggtctcaaatcaataacctaatcttccatcttaagaaactagaaaaagaagtgcaaactaaacccaaagcaagcagaaggcaggaaataataaagattagaaaggaagtaaatgaaacagagaaaagaaaaacaagagaaaatcgaccaaaccaagtttggttctttgaaaagatctacaaaattgacaaatctttaactagactaaccaagggaaaaaagaaaagtctaaaattattaaagtcaagaatgaaggaggagacatcactactgaccttacacaaatacaaaggcttataagggaataccatgaataagtgcgtgccaacatattagatagtctaggtaaaatggtcaaattcctagaaagacacaaactatcaaaactgactgaaaaatatagaaaatctgagtacacctataacaagagattgaaatggtaattttaaaagttttcacaaagaaaagtccacaatcagatggtttcactggtgaattctaccaaatattcaaagaagaatcaacacaaatccctcacgaatgtttttgaaacatagaacaagagagaacacttcctacctcattccatgaggtcaatattaccctgataccaaaatcaaacacatcgtaaaaaaagaaaaccaaaaagagaccaatatcctttataaatatagataaaaacattctccaccaggcgcagagaatcaaacctgtaatcccagcactttgggaggccaaggtggacggatcacctgaggtcaggagttcaagaccagcctggccaacatggcaaaaccccgtctctactaaaaatacaaaaattagccaggcgtggtggcgtatgcctgtagtcccacgtacttgggacgctgaggcaagagaattgcttgaacccaggggttggaggttgcaatgagccaagatcatgccactgcactccagcctgggcaacagagagataatccatctcaaaaaaaaaaaaaattctcaacaaaatactacgaaactgattccagaaacatataaaaaggattatatgccatgaccaagtgagatttattttaggaatgcaagacatgaaaattcatcagtgtaataaaccatattaacaaactaaagaacaagaagtacatgatcatctctgcaggtgaaaaaaaagcattttacaaaaaatccaacattctttcatgataaaaaattaaaactcaataaactaggaatagaatgaaatttcctcaacctaataaagggcatttatgaaaaacctacagctgacattatacttaattatgaaagactgaaacctttcccctaagatcaggcacatgatcagatgtctactcttattgtgtctatttaacattgtactgggagttctagccaggacagtcaggcaaggaaaaaaaaaaaaaaaaagcatccaggcagacgtggtggctcatgcctgtaatcccaacacaatgggaggccgaaacagccggatcacttgaggtcatgagtttgagaccagcctggccaagatggcaaaaccctgtctgtactaaaaatacaaaaattagctgggcgtgatggtgcatgcttgtagtcccagctacttgggaggctgaggcaggagaattgcttgaactgggagatggaggttgcagtgagctgagatcatgccactgcatgcactccagcctgggcgacagagcaagactctgtctcaaaaaaaaaaaaaaaaaaattcagactataaaggaagaaggaaaactctatttgcaggtgacataatcttacacataggaaagtcttaaggaatctacacacacacacacacaactactagagctaattaacaattttagcaatttttcagaatacaagatcaatatctaaaaatcagttgtatttctgtatacatcagcaattaacagtctgaaaataaaattaagaaaacaattccattcgtaatagcatcaaaaagaataaaaggcttaggtatgaacttaagaagactttgtaagaattttacactataatgcacaaaaccaacatcaaaataaatgttaacagacatagataagtggagagacactctgtgtttatgaattggaagatttaatattgtttagatggcaatattccccaaatagaactgcagattcaacacaatccacatcaaaattacagctgccttttttgtagaaattgacaagctgattttaaaatttatatgaaaatgcaaggaatccagaatagccaaaataatcttgaaaaggaacaaagtcagaggacctacacttcccaattttaaaacttactactaagctgagtaatcaagatttttggtacttacataaacacagaggaatgagagtctattttaaaaactcatatgtctatagtcaactgattttcaacaagggtgccaaaaaaatcaatgaagaaattcaatgccttttcaacaaatggtgctggcacaattatatatccacaggtaaaaacaggaagttggacccctgcctcacaccacatatacaacttaacttgaaatggatcagaggcctaaatgttaagagttaaacctggaaaactctcagaaaacatagatgtatagtcgtgcgttgcttaacaatggggatacattctgagatatgtatcgttaggtgatttcatcattgtgcaaacatcatggagtgtacttatccaaacctaaatggtagagcctactgaatacgtgggctagaggataaaacctattgctactaggctacaaacctgtacagcatgttactttactgaatattgtaagcaatggaaacacaatgggtatttgcatacctaaacatagaaaaggtatagtaaaaatacagtattataatcttatagaccaccatcatgtatgtggtccatcactgaccaaaatgtcattatatggtgcacgactgtatatctttgtaaccttagatatgacatcatggcttcttagatattacatcacaagtacatgcaataaaaaaatacatacaaattagacctcatcaaattttaaattttgtgcttcaaaagacactattaatgaagtgaaaagaaaacctacaggatgggagatttgcaaatcatctgatacaatctgataagtagtgtctagactccagaatatataaagagcacttacaattcaacagcaagaagacaaataactcaattttaaaatgggcaaaagatctaagtagacatttctccaaagaagatatataaatggccaaggagcacataaatatatacctaacatcattagtcattaaagaaactaaatggatgagccaggcacggtggctcacacctgtaatcccagcactttgggaggccaaggcaggcagatcacctgaggtcgggagttcaagaccagtctgaccaacatggagaaaacctgtctctactaaaaatacaaaattagccaggcgtggtggcaggcacctgtagtcccaactactcaggaggctgaggcagtagaaacggttgaacccgggaggtggaggttgccatgagccaagatcgcgccatcgcactccagtctgggcaacaagagtaaagctccgtctcaaaaaaaagaaattaaatggatggattaaaatggtggccactacccaagtcaaatgaaatcttccccctccatggtccctggacaagggaatgttactcttacaaatcttctgttgacaatacattttgattgtttgggttttttgtttgttgacaaataattgcatatattcatgggaaacatagtgatatttcaataaagaaaatgtatgatgatcagagcagggtaatttcatgtcctttgtgaaaggaaaataaatctcctccagaaatcactaagccaaagggaaaagtcaagatgggacatccatcaggcaaacatgcctcctgttttattcctaaataagataactacaaaaatttaaaaagctacacagttccctcaaaatatgtcagaaaggaaatttcttgtgagcctcaagatctttatcctgaaacagttctgttgaatttcaccctggcaatgtaaattgataactgataccttatcttcacagatgggggacaaaggacagacagaacccaacgccatccctcttctcacctgagacaaatgcatatctgatggcttcctctgcccagttgtttatgtaaaaatgcagattcactaagcgagactcaggcataagtgactactcctctatggcgtctcacatataaattgtgtattcagtgaaagacttatcagagactcaaaagaatgcaactgttggtctcttatctatctgtgacctggaagcaccccaccccccaaccctggtaggtgcatcaagttgtcccatctttccagacagaaccaatatacatcttacatatattgagtggtgtccatgtctccttaaaatgtataaagtgaagctgtgccccaaccgccttgggcacatgtcatcaggacctcctgaggctgtgtcacaggagtgtccttaaccttggcaagataaactttctaaattgattgcaacctgtctcagatacttttggatcacacctctaacaagcctccccctatcccttcccaccctctagtatcctacatttttgagtggtagaagttccaagctaggaggaattggtcttaaagatagtctaacaacattctcaaattttaggatgtttccaagtcatctggagggcttgtcaaaacacatatttctggagcccaatcccagagtttctgatttagtaagtctggggtggggcccagaaattggattttctcaaaagtttacagttgatgctgatgcagctggtgtaaccctttccttctacacatatgaaagctggctccaacagagatggtgtgaatggtgcagctagttgtacaaagtgctgtccagtaagaaccttctgtgatgatgtacatgctcttctgtcctccccaacaccgtagccacatgtggttactgagcacttaaaacgtggctagtgcaactgagacttcatatttttaatgcaattaatcttaatgaattttaattcatatgatcgcatatcatacttactagagtaagtaccatgttggacaccacatttctacaagtgaggtctcctgactcccaagccagtaaactttctaatacacagtactgccttctgttttcaagccactaaggatgtatgcaagaggagaatctctaggtcttagtaaacctacatgctcaacttgccaatagacattgtcaaatggttgtctgtggctgagaccatggtatacactcaccaaattctgtttccagttccttcttcaaaggcacatgagaaaatatatttctccatccacttgcagtgagatgagaccacacgactggttctggacaaggaaatataagctgaagtgacatatgtcacttctagaccgaggcaatgaaaacctcctgagagattttcttttttttgttgttttttttcttttttgagacggagtcttgctctgtcgcccaggctggagtgcagtgacacaatatcggttcattgcaagctccgcctcccgggttcatgccattctccttcctcagcctcctgagtagctgggaccacaggcacccgccaccacgcccggttaatttttttttcttttttgtatttttagtagagatggggtttcaccatgttagtcaggatggtctcgatctactgacctcgtgatccgcccgcctcggcctcccaaagtgctgagattataggcgtgagccaccgcgcccagcctgagagattttctcatctctctctccccagctctggcagcatagaggcctttaggagagatgaaagatgctaggttacagggttaacacatggagctggcctgaagagtagctgggatttacagtggactttgtgtgaatgagagataaactttaattgtgctaactgagatttttgaagttatttgttactgcactgtgacctagtctatcctaaattatacactcgctggcatgattgtatcaatactcccatcagcattttatgagaatttccatctccccatacttatttatttattcgaaaaatagttattggccaggtgtggtggctcacacctgtaatcccagcactttgggaggccaaggcggctggatcacctgaggtcaggagttcgagaccaacctggccaacatgatgaaaacccatctctactaaaaatacaaaaaattagccaggcatggttgcggatgcctgtaatcccagttactcaggaggctgaggcaggagaatcccttgaacccgggaggcggaggttgcaatgggcagagagcatgccattgcactccagcctgggagatagagagagactccatctcaaacaaaaataaagttattgatagctgggcctggtggcatgcacctgtagtcccagctacttgggaggctgaagtgggaggattgcttgggcctgggaggcagaggttgcaatgagccaagattgcaccaactgcattccagcctgggcaacatagcaagacactgactcaaaaaaacatagttattgagcacctactatgttcctgggtctattttaggcactggagatacaacagcaaacaaaatagacagaaaattgtgacctcatggaacttatattccagtgaaagaatcaaacaataaatataatgaaaaagaagataatattatattttattttagcaggtgggcactgctatgaaaaacattaaagccaggtaaagggaattgagagcattgggttgcaatttttttttcttttttaaattttatttctttattgatacataacagatatacatattttcagggaacatgcggtaacttaataaatttatataatttgtaaagaccaaatcagggggccaggtgtggtggctcatgcctgtaatcccaacactttgggaagccgaggtgggtggatcacaaggtcagaagttcaagaccagcctggccaagatgatgaaaccctgtctctgctaaacatacaaaaattaggctggcatggtggtgggcacctgtaatcccagctactcgggaggctgaggtagaaaattgcttgaacacgggaggcggcagttgcagtgagctgagattgcaccactgtactccagcctgggcgacagagcaagactctgtctaaaaaaaaaaaaaaaaaaaaaaaaaagatcaaatcagggtaattaggatattcatcaccttaaatattcatctttatgctaaaaacatgaagtcttcttctattattctaattttgaaatgtacaacagattattgtaaactatactcaccctactgatctatcaaacaccagatcttatttcttccatcttacatttcttccaaatgtagctatacatttgtacccattagtcaatttctcttcatttcccccctccaccctacccttcctggctactggtaggaatcacctatctgctctctatcttcatgagatccactttttcagcacccacacatgaatgaaaacatacgatatttgtctttctgtgcttggcttatttcacttaacatgatgctgcaaatgtcagaatttcattcttttttatggctgaataatattccattgtgtacatatagcacattttttctttttttttttcttttgagacagcgtctctctctgtcacccaggctggagtgcagtagcgcaatctcagctccctgtaacctctgcctccagggttcaagcaattctcgtgcctcagcctccctagtagttggaattacaggcatgagccaccaccggttaatttttgtatttttagtagagatggggtttcaccatgttgtgcaggctggtcttgaactgacctcaagtgatccacctcccaaagtgctgagattacaggcgtgagccacctcactcaaccatataccacattttctttatgcattcgctctttgatgggcacttagattgactccattatcttggttattgcagcaaacagtgctgcaataaacatgtgaatgcaaagagcatttctccagtgttttcctctggtagtttcatagtttcagatcttagatttgagtctttaatagatttttgtttaattcttggatacagtgacttccttccttttgggtgtattcatagcatgggattgctggatcatatggtagttctatttataattttttgaggaacctccatactgttctccagagtggctgtactaatttacattcccaccaacagtgtatgagggttcccctttctctacgtctttgccagcatccacctttttataaaggccgttttaactggggtgaggtgatagctcactgtagctttgatttgcatttctctgacaattagcgatgttgagcatttttgtatataccccttagccatttgaatgtcttcttttaagaaacgtccattcagatcctttgctcactgtattagtcagggttctctagagggacagaactgataggatagatgtatatatgaaggggagtgtaataaggagtattgagtcacatgatcacaaggtgaataggccgtctgcaagctgaggagcaagaagccagtcccaaaacctcaaaagtagggaagccgactgagcatggtggctcaagcctgtgatcccagcactttgggaggccaaggaaggtgaatcacctgaggtcaggagttcaagaccagcctggccaacatggtgaaaccccatctctactaaaaacacagaaaatagtcgggcatggtggtgcacgcctgtaatcgcacctactcgggaggctgaggcaggagaattgcttgaacccgggaggcagaggttgcagtgagccgagatggtgccactgcattccagcctgggtgacagagtgagactccatctcaaaaagaaaaaaaaaagtagggaagctgacagtgcagacttcagtctgtagccaaaggccctggcaaatcactggtgaaagtccgcacgtccaaaagctgaagaacttggagactgatcaagggcaggaagcatccagcacggaagaaagatgaaggccggaagtctcagcgagtctgcccattccattttcttcttcctgctttatcctagccgtgctggcagctggtgggtacccacccagattgagggtgggtctgcccctcccagtccactgactcaaatgttaatctcttttgggaacacactcacagacacatccaggaacaatactttgcatccttcaatccaatcaagctgacactctgtattaaccatcacacccgtttttgtttttttgtttttgtttttttttttgagacggagtctcgctctgttgcccaggctggagtgtggtggtgtgatctcagctcactgcaacctctgccttctgggttcaagcagttctccctcctcagcctactgcatagctgggattacaggcatgtgccaccacacccagctaatttttgtagttttagtagagaagaggtttcaccatgttggtcaggctggtcttcaacccctgacctcaagtgatccgcccaccttggcctcccaaagtgctgggattacaggcgtgagccactgagcccggcccacacccactttctaactagatttttttttcctgttgaattgtttgagctccttatatattctggttattaatcccctgtcagatggatagtttgcaaatattttcttccattctgtggtgtgcctcttcactttgtttattgttccctttgctttgcagaagctttttgggttgatacaatcccatttgtctattttcacttcgttgccggtgcttttgaagccttacacaaaaaatctttgcccagactaatgtcctggagcaattccccaatgatttcttctggtaatctcatagtttcaggtcttggatttaagtctttaatagatttttgtttgtttatttatttatttttattttatatatatatttatttatttattgagtcagattctccctctattgcctaggctggagtgcagtggcacaatctcggctcactgcaatctccacctcctgggtttgagcgatcctccagcctcagcctccccagtagctgggactacaggctcacgctaccacacgcagctaattttccagagcatcccaactggaaaggaagaagtcatattagccttgttcatagatgacattttttttacaatagctttatttattattttattttttagagatagggtctcactcactctatcgtccaggctggagtgcagtagcaccattatagctcaccgcagccttgatctcctgggctcaagtgacctccctgtcttagtctcctgagtagctaggactacaggtgcaccccactatgcctggctaattttttaattttgttgtagaggttgggtcttgctctgttgtccagtgtggccttgaactccttgcttcaagtgatcctcctgccttggcctcctaaaatgctgggattacaggtatgagccacctgggcaacacggcaaaacctcatgcctggcctgatatgatcttatactcgactccaccaaaaaactgttaaaactgataaacaaattcagtaaagttgcaggatacaaaatcaacatacaaaaatcagtagcgtttggccaggtgcagtggcttacgcctgtaatcccagcaatttgagaggccgaggcaagtggatcacctgaggtcaggagttccagaccagccttgccaacatgttgaaagcctgtctctactaaaaatacaaaaaattagctgggtgtggtggcgggcgcctgtaatcccagctacctgggagcctaaggcaggagaatggcttgaacctgggagacagaggttgcagtgagccccgagatcacaccattgcactccagcctgggcaaaaagagcaaaactctgtctcaaaaacaacaacaacaaatccaaaccaaaaaaaaccccaaatcagtagcatttatatatgccaacagcaaacaatctgaaaaagaaatcaagagagcagtcccatttacaatagccacaaagaatataaaatacctaggaatcaatttaaccaaagaagtaaaagatctgtacaaggaaagctataaaaacactaatgaaagaagctgaagaggacatacacaaaaaattgaaagatatttcatgctcatggtttagaagaattaattttgttaaaatgacaatactgcccaaaggaatttgcagatccagtgcaatccctatcaaaataccggcgacattcttcacagaaatagaaaaaacaatgctaaaatttacacagaaccacgaaagaccccaaaatagccaaagcaatcctgaacaaaaagaacaaagctaaaggcatcacactacgtgacttcaaaatagacgacaaagctatggtaaccaaatcagcatgatactggcataaagacagacatgtagaccactggagcagaatagaaaacccagatataaatccacacatttacagccaactcattgtcagcaaaggcaccaacaacatacaatggggggagaacaatctcttcaataaatggtgctgagaaaatcggaaaactgtacgtagaagaatgaaactagagctgtagctctcaccatatacaaaaattaaacaggccgggctcaatggctcatgcctgtaattccagcactttgggaggctgaggtgggtggatcacttggggtcaggagttcaagaccagcctggtcaacacagtgaaaccctgtctctactaaaaatacaaaaatagccaggcgtggtggcaagcacctatagtcccagctactcgggggctgaggcaggagaatcgcttgaaccaggctgcagggagccaagatcgcaccactgcactccagcctgggcaacagagcgagattctatctcaaaaaaaaaaaaaaaaccaactgtgttatcctctcactgaatatacccctttatcattgtacagtgacctgctctgtttcttttcacaagcttggaattgtagtctcttttatctgataccatatatagataccaagtatagctacccctgcttttttttttttttttttttttggtttccagttgcacggaatatctttctctaactcttcactttcagtctaagtgtgtctttataggtgaactgggtttcttgtagacagcatagagttgggccttttttcttttttctttcgagacaaggtttgtggcccaggctggagtacagtggggaaatctcggctcactgctatctccgcctcccagtatcaagtgatcctcccacatcagcctcctgagtagtcaggaatacaagtgcacgccagccaccacgcccagcaaatttttttttttttttttttggtagagacgaggttcactatgttgcccaggctggtctccaactcctgagctcaagcaatcttcctgccttggcctcccaaagtgcttggattacaggcatgagccaccatgcctggcctgggtcttattctttatccattcagccactttatgccttttaattggataatttatttccttaacattcatgttattattgataagtaaggacttactactgctattttgttgcttattttctggttgttttcttccttcttttttttttttttgagacagagtcttgctctgtcgcccagtcatgactgcagtggcgcgatctcgactcactgcaacctctgcctcccgggttcaagcaattctcctgcatcagcctcccgagtagctgggactacaggcacccaccaccacactcacctaatttttgtatttttagtagagacggggttttgccacgttggccaagtggatctcgaactcttgacctcaagtgatccgcctccctcggcctcccatagttctgggattacaggcgtgaaccaccatgcctggccccctttttttctttcttactgtcttcctttgtggttaagtgattttctctggtagtatgttttaacttgttactttttatttttattgaatctattataggtttttgcattgtggttaccttaaggcttataaaaaaatcttataacaagttttttgttttttgtttttttttgagatgaagtttcatttttattgcccaggctggagtgcaatggcacaatctcggctcaccacaacctccgcctcccaggttcaagcgattctcctgcctcagtctcccgagtagctggaattacaggcatgtgccaccacgcccggctaattttttgtatttttagtagagaagcggtttctctatgttagtcaggctgatctcgaactcccgacctcaggtgatccgcctgcttcagcctcccaaagtgctgggattataggtgtgggccaccgtgcctggcccccttttttcctttcttactgtcttcctttgtggttaagtgattttctctggtagtacgttttaacttgctactttttatttttattgaatctattataggtttttgcattgtggttaccttgaggcttctaaaaaaaatcttataacaagttattttaaagcgataacatcttagatcacaaagaaaaaaatagaaacaatgaataaaaactccacactttatctccttccctcccacattttgactttttgtttcctcaatttacatatttttattttgcttgtcttttaacaagctgctatagctattattgttttaattatggggtcttactgtgttgctcagactggcctcaaactcctaggttcaagtgatcctcctgcctcagcctcccaagtagctgagactacacccagctcaatattattgtttttgatagatttgtctttgaggctttatggtagagttaagaatgaattgcataccacaattacagtattggagtatcctgggtttctctgtgcacctaattttaccaatgggttttataccttcaaatattttctttggccaggaatgatggctcacacctgtaatcccaacactttaggaggccaatgggggaagactgcttgagctcaggaattcgagaccagcctgggcaacatggcaaaaccccatctctaccagaaagaaaatacaaaaattagccaggcatggtggtgtgcacctgtagtcccagctactcaggaggctgaggtgggaggatcactggagcctggcagtttgaggctgcagtaagctatgattgggccactgcactccatcctgggtgatagagcaagatcgtgtctcaaaaaaaattttttttctttttgcatggttttttttttttccggattgaggaactctctggaactgtctttcttcaagagagcatttcttataatacagatctggtagtggtgaattctctctgcttttatttgggaaaaactttatctcttcttcatatttgaataatagctttgcttgatacagtattcttgtatggccttcatggttttgattgagaagtctgtggccaggtaaattagagctcttttaagtgttatttccttcttttctcttactgtttctaggatcctctctttgttcttgacctttgagagtttgattattatatgccttggggtaatcaaatctatttggtgttctctggcctttctgtacctggatatttgcaatttttgaatgtcttccattgtttctttgaatatcctttctatccccttgctcctcctcagctccctcttgaacaccaataattcttagattttgtcttctatatttcgtaggtgatttccattcctttcattcttttttcttttttcttctgtatgtatttacaaacagcccgtctccaagttcactgattgtttcctctgcttgacccactctgctgttgagaacctctaatgaacttttcagttcagcaaatgtatttctcagttctaagatttgtttgggttttttttaaattattatttcaatctctttgttaaatttcactgataaatttctgcgttgcttttctatgtcgtcttggaattcactgagtttccttaaaaatgccattttgaattcttagaaagctcacatattactgtcttgttaggtttagtcactggtcccttacttggtccatttggggagctcatggttccctgtttgctttggtttgttgttaatgtacatctatgcctttgcactgaaggattagtcacttattccagccttctccgtctggcttgttttggcttttactggctccatttgcttacagattcttcgtaattgacctgttggtttctttttttctgctaggttgctgcctcctttttagcactcagtggcaccttaaaaccaggtttgccttggctctattaaagatcagagcgtctcccatcccgaatgggggaggtcccaaaggggatatcccagtagcataggaaagctggctaggggttcattcccaggggagctatggaagaaacctcccacagcatggtgctaacgaacagccactctgatttggcatctcctttggccaagttatagagtagagagagtttccagggctggggatggtagtcccacctccccactttgtctgtggctattctcagaggatatttctcccttgaggcactcctgatggttgtattcttgtgattacagcactttgggaggccaaggcaggcggatcacttgagctcaagagtttgagaccagcctggccaacatggtgaaaccctgtctttactaaaaatacaaaaattagccaagtgtagtggtgggtgcctgtagtcccaactacttgggaggctgaggcaggagaatcgcttaaacctgggaggcggaggttgtagtgagccaagatcatgccactgcactctagcctatgtgacagagcaagactccgtctcaaaaaaaatacagatcttgtgtgaactaacagaataagaactcacttgttaccgtgaggacagcaccaagtcattcatgagggatccacccctatgacccaaacacctcccaccaggccccacctccaacattggtgatcacattttaacatgagatttgagactgagtaacaagtgttaggattaaaggcatgagccaccgcgcccggccatcttctttacctctccactgtgtcagttttatttttctcttcttctctagacactttgttcctcaagatagggggcagagtgggaaaatgaccatagtcagaatctatgggaaggacccacccaaaaggaaaaggcttcttgtgcccaggctgcagatccaaaccccagggaaggactctcattggttcagtctccattctgttccaggtggagcataatgattggtccagcctgactcgtttgcccatctcttaaccatcaacatggtggggaggggacacgcaggagactgtcagctcctatcctaaacgggggagggggcaggggtgatcattttctgagctcctataaacaaagtttcagttctttttcctcctatggctggaacactggaataaggaaagaggtcgtctgtctggagaggctggttggggagtatggtctccccagcccagccaagctcaggtccctgcatacagcaggcgcctaattgatgcttatagcacgaatgactgaatgaataccccgttcccacaggctgtcctgggatggtcctaatttcacagaccctgagcggatcaagaatgaagcgggcccaggggtcccgcccaccggctgagtgcgtcttaggacgcagagacaagaccacggagggcggaacctctgagcgttaggtggcaccttggagaccccgccacctccaaaggcccagttaggggcggagcttctaaaccctagcattttggattgaaccatcgtccgtcggttaaaggggagagccgagaaagcccttctgcatttgtcgccagcctttttaccacctcctggccacagaaacgacgtatttgcttctctaacggcgacgccgtttcccccttcgcctcgttactcctcaaagccccacgcggccacagagttcagacttacccaccaccaccttgcagtggctcgccccagtttgacgcattgcagggaaggtcggaccaatgggcgccaagctctcatttccgccatgggccaggcccaatagtgacgcggctcacagagggacgcgtcacgcaccgccgagctgtgcccctccgccgaagaaagtgaagtgggcccgggaggcggggcgcgcggcgagggaaagtagtccggcgacgggagcgagcgcgcgcgcgcccggcggcaaacccaattcctgtgcagggtggggacgagagattcgcgggcccgtaggtgtggagcggggcgcggagggatccgtgggagccgcagtgcggcggcgcgcgggccgggtggggcggggccgagcgaggcggggcgcgcgcggcggccgttgagggaccgttggggcgggaggcggcggcggcggcggcgcgcgctgcgggcagtgagtgtggaggcgcggacgcgcggcggagctggaactgctgcagctgctgccgccgccggaggaaccttgatccccgtgctccggacaccccgggcctcgccatggtgagtgaggctggggggtcgccgaggctgcgggctctgaggcgggcttaacggggcaggacccctgagggggcgacagagcccagagtggggggcgtccgggcccggcgagagcctcgggacccttttctacccgcgttgtcgggggctgttgaacccagagcgggacgtctggatcaccagaggtttccagaagcgactttagcaccaaatgggatgtttaagtccacaaatgggtatctgagcccctaaaggggacatttgaaccccggatggaggatcgggaccctcagtgggacccctcaaaaggattttggacccaggatggggcgttgggtttcaggatggaggtgtttggaccccaggggacgaaataagaaagatgggctggggaggggagctattcgggccctgatgaaggcgtttggtcctgagaggatgcggggaacgggggacgaagggaggctgggctgctcctggatggggtggtggagggtagctgggcccgggcggggaggggcgacccctgggctcctgtggagcagaggagagggtcaaggatgggcggtcacttctacagatgagactcccgagggtgggggagggtgggggagggtggtctccagagcccagcactgcagaggaggaggagggtgaggtgcaagcttatgggaggaagagcctggggtgggtggcagcggagattagaagatactcttgaaggcttccgggacggagaaggatcagggtcgtggaggtggtgaaaagggatggtgagagtggggctcgccagtagtcgggggacagggacccttggggttaatttggaagtagctagaaaaggttccgaggttactagtgggttaagactgttgctctagaaagacagaatttttttaacggggtgggagtgttgtgtttgggtccaagagaagatggatttccaaggtgaggggtgggggaggacttgggcttgggtggttgggaggtgaggtggaaggagaaaatgaatggcagtcaggggggcctaggtttgggggtggatgtgggtagcaccctgccagtctccagggacaggccaggacaaagacggctcagtgtggatggggagtgggctgcagggcccggaggaagcttttctaccgtcctccttcctcaggaagaacgcggctgggtggaagacaccggggcagtgggagcaggtgggcggagctgttcgggcccctattgcgcactgaagcctcatgaaatggggatgggagatcaaagtttggggtgcctcgaatgagccagctttttcaagcctagaagcctcactctgtcgctgcccttttcaggccaagagcactgccttttcccagcaggagcgccggttttctcatgatccccagccccacgcaccatgctgcacctcgtcacttgtgccaaatgacagtgcagtacagtgtggcgtcagtgacaatcagatgcctattcccgtgccctcggggtgggggctgcagagcttgatcagagagtgcctctggggagaccccttgatcggcctgagggccacttgttccattcagggccctcgctgagcgtgtctgttaattcacagggctttgagagaaaaccagcagactagttctttcctactccctgccacccacaacacccacagccccaccaggctgagcctgggaaccgtgtgcagccatcctccctggcaaggctggggagaacaggcagccgctgctgtgtatcagatctcatacttgctgacacagacctgatggctcctcttgccgctaccccattttcccccagcagaacctggctaaaaggggccctgaagcactagcaggccccctacctccagaataggacccaagctttggccacaactagtttctctttctgtttgtaatcagcaaggtagaggtgggacaagtcactggtaactggccttggactttggcctgagctctgtggctcctccttggcccgggtgaggggccctggccttggtttctgatctcatctaacactgctctctggcattggctgggggctggggcaaggcagagaaatcacaccctcttccctcccccacctcatggttttttttcttgtccagccccttgctggagcctaagatgagggataaggaagcaggagaccagctgagttattttggaaacagtttttgttgaaagtttagtcttcaggtctagaaagggaagaaaccttgagcaaggatcaatgatatcttcttaggcggtcggttttctgggcggcaaccttgcttgagatctgtacctttccttgaccaagcagggaagtgggtctccaacatgggagggagagcatctgacaggccctccatgcagagccacgcctatttgcagcaaccctgtgacagaactgaacatggcagtgcctcatctgcatcttccagtcttttggtggagactggcaaacggtggccttcagagccgctcggggcagtctgcagcctgtcacagcctcctcgcccccacccccagccccttacagtgctgcccaaaggtccggggagctggacttcttgcagggcggaacagtgggctgggaaggccctgacctggctcgctttttccattctaggccaggggaaagaatgaaaagcagatgggatggcagccacctccccacactgctgccctcctctctgttctttccctgaccctccctgggcattgcctggtctcggtaaccagaagcccatcctcccttctcactttccctaagcctcttcctcaggtgtcaggacctaagggatggctccaggcttttttgtccatggtgggaggtggggggcaggtggatcaagaggctcatgggcctggggctaccaggttggcatttagaagcccaaccaccctgtcttttttgaaggcaatgcagaagaatcttcatttggcctccccacctcccctttacactttggacttttccagaatgtgcatgtgtgccgttttctcccttcctctttccccctccctaagccctctcccctctgtgatcatcattttgattacccctcccattctgcctatttggggcttgcaagttcttcttccgttaggttttttttttttttttctaacttttttagatcagtgattgttaatatttgggacggggatgggggtaggggaggcaggcagtggtttgttcctagcttctggaacctctccgtagaatactgcaaattcacataatagtctgcttctatttctgaggctctcagactcgagactagaacatgctatagacttggagcccctttccctgattgtgaaaggaaggggaacagacccaccatggtcccgggatggtggtgccttcttcacagcatcaacaaaaaccagggaaaatgtgtcttttggctgctaaagctaaatgttgggattcagcctccccaaccccccagccccgctcctgccccataggatcactatgcctggctgatgcccagcacaccagtgcaggagaagccagtccccgcatctcctccccacccccaaaccccgcatgcagcaagggctgcctgccacccactggccagtccccagagtgcccaagctggaaagggttaaaaactgcagtgcaagccagcttcagtcctctgctgctgcccgctgcagccctctccctgacgtttgtcccttctgcccaaaagaaacaaaacagaatggccctgtgccctcactgtgcgcagggggtggagcgcctgcctccagcctgaccagagttctttaggtgcttgagcaactcgggccgccggttaggagaatttttgccacttgggtggactctgcctgagccaaccgcctccaaataggtgacacagaaactagcagagatagccccagacatcgtccctctgccctacccaaggactggcctgcttcagtttggagccttctagagcttcttgatgaggcctccagggcaatcgttcccttcactcggcctctggggctctcactgatgagatgcaaacctgtgccaggcctcaccagcgctgctggtttggggctggggcaggcttttctcccgcccctgtggctcccacatgctgagttgagattggaagcccgtgggtctgggcagcttcatcgggccgtgcgtccagcaggcctgagtgtccagcccaccctggtacccagctttctgaatcaccagactttatcatcaggcgctggctctgcctcagaccctgactctggcatgctcctccctggcccggcgggaatggcacgtggagctggcctcactggggccgagggtctgggctgagtgaggaagatgcgtccgtgctgtccggcctggtgactgactttccccttcatgcttttacaggctgaccagctgactgaggagcagattgcaggtgagtctgctatccccctcatcttagctcaggaaagcctccacatccccagccaaatcttagccactgaggagtgacatctgatgggtgaacctgtgtatcccttgtgtcacctaacactatgccttgtgcctagaatgctgataaatgtgtgtaagagcacaccagtgccccaatgacacgaagccccatggccctgagacaggcctttaccagacaccaaaggctgtgttcctctcctgggcctgggtcatctaggggcttgatatcagtggctgcaggacgagcccaactctctctcccagcttcagccaggttggcttagaaggtgagctccctgcctccctgtggggcctgcagagctcctgtcccactttaggagccgcccaggagctggctcgtcactcccacctctgcgcttgcctgcgctttgcacttcctttcgcatgtgcctgcgcctgcctgttctgctggcggaagtgcctccccagtgctttgcatgggcagctccttcccgtcccttagctcagatgtcccctcggggaggccttccctgacccccatctcaagtacacagccttcctttactctccttcacatcactttattttcttcataacctttctcgctgtctgaaattattttcttatgtcttcacctgttgtatctcctgttactagatgtgagttccattgagtttgggacttggttttgttggtccctgctatagccttaatgcctgcctagaacgtagtaggtcctccgcaaacttttgctggctaaacaaacatctctctctcagcaagctagaagaaatccctggatcccatctaattcatttttctaacccctccaaaaccccagaagggtcagctacaggaactattgtgtaattacagatccgtgcctgcctacccgcccatactgagctgcccgaggacagagagcaactcttggtttatctccatagccaggggccagcacacagtagaccagagtagcgatccagagaatgggcctctgctccccaccagctacccagcccccagctctgctgtcaggttcaaccggctgtgtaacaagtactaaaggcccagcttctgcggtgggaggcaggaacggacttgccttctctcctttctcccctcaacccgcatcacagagtcacctttgcagcttcaaaattttggccctgggtggctatggagacccctgaggaaagccagaagatggcctggtttagtgatcatgagctcggggtgccccatgacccactcactacctgccctccccaagaacaacaaggcctcagcacagggaggtgccagcctccccaaagagactcttgccatgtccccagggcccagaggctcagggccacagcttcccagctgtgcatgtccctcccaatgcacctgccacccatctcccaactctggccttgtgcaacataaacggtctgcttttcaccctgtccccattagcaaactgtccaccgcctcaccccagcccacaccctctgggaataggctgccggacatctgtttttggagggcttgggggtagaggagcaccaggtgccaaaatgggcccagtgggagggcaagagccatgtgcttttctccctgcccctgatgcggccccagctgtggccttcccactcagcactgctagctcctcatcctcctggcttggcagccgtcccctcgctttccatccccccatcaaccccacgcactgtccgtcagccatgttctgctgccgaccacccccacgctcaccacacgcagtggctcagctcctttggaagctggtagcacccacggcaaggaacagggctgccagtcagaagggagtggatgcctgcatttcctcttcaggccggccagaggcattctgcagcctcccctcctcgtcccagccagccaaccctggctaacacactcagacaaagaatcctttcggctctcattcactccatgactttggttcatttcatcatttcaagggagaagtcaaagccagggaccaaacagaaatgtagaatcatctaaggacagctgtcagaccattttccccactgtcttcactggctggccagaaaaatagcttcacctagcacagtgttgatgttcaataactgttgaatgaaggttggaagggctttgccctgagcactgaggagagagagctggttgcgtgggacttgaagtctgtctcagtttctttaggtgggactgatgcccttggccttcctccagggaaggcatccagcatccagaggtaaggattctcctgtggaccttgtgacctctgactcctcccccttcttcccccagagttcaaggaggccttctccctctttgacaaggatggagatggcactatcaccaccaaggagttggggacagtgatgagatccctgggacagaaccccactgaagcagagctgcaggatatgatcaatgaggtggatgcagatggtgagccccacagagcgcgtgggcagccctgctcctggtcaccccgagtgactgcagggagcctctctcagggtgatggatgagcccgtgtctctcagggcccaggccaagagcattctccatcctttccccaccttccagggaacgggaccattgacttcccggagttcctgaccatgatggccagaaagatgaaggacacagacagtgaggaggagatccgagaggcgttccgtgtctttgacaaggtaagcagccctctccaggggcggctctgagactgacgccagccttcaggcagacaggcggaactggagccacggagctaccacttccaggaggtccgggtcccggtgccagcctcattgccaacctgctctgccacctcaggcagcctccctcactgtgctcactgctgagggatggtgatgacagccacccctctcactgcctctctccccaccgggagaagtgcccagtgaaaggctttatccccaacccccaggatgggaatggctacatcagcgccgcagagctgcgtcacgtaatgacgaacctgggggagaagctgaccgatgaggaggtggatgagatgatcagggaggctgacatcgatggagatggccaggtcaattatgaaggtgagtcaaggccaggcttgatctctggaacaagaagagaatcgcagcttcaggaacaagcccccagatccctcttgttggggagggccgctcgccacttagcctgcccgcctgacctcctctctctctgcttcactccacagagtttgtacagatgatgactgcaaagtgaaggccccccgggcagctggcgatgcccgttctcttgatctctctcttctcgcgcgcgcactctctcttcaacactcccctgcgtaccccggttctagcaaacaccaattgattgactgagaatctgataaagcaacaaaagatttgtcccaagctgcatgattgctctttctccttcttccctgagtctctctccatgcccctcatctcttccttttgccctcgcctcttccatccatgtcttccaaggcctgatgcattcataagttgaagccctccccagatccccttggggagcctctgccctcctccagcccggatggctctcctccattttggtttgtttcctcttgtttgtcatcttattttgggtgctggggtggctgccagccctgtcccgggacctgctgggagggacaagaggccctcccccaggcagaagagcatgccctttgccgttgcatgcaaccagccctgtgattccacgtgcagatcccagcagcctgttggggcaggggtgccaagagaggcattccagaaggactgagggggcgttgaggaattgtggcgttgactggatgtggcccaggagggggtcgagggggccaactcacagaaggggactgacagtgggcaacactcacatcccactggctgctgttctgaaaccatctgattggctttctgaggtttggctgggtggggactgctcatttggccactctgcaaattggacttgcccgcgttcctgaagcgctctcgagctgttctgtaaatacctggtgctaacatcccatgccgctccctcctcacgatgcacccaccgccctgagggcccgtcctaggaatggatgtggggatggtcgctttgtaatgtgctggttctctttttttttctttcccctctatggcccttaagactttcattttgttcagaaccatgctgggctagctaaagggtggggagagggaagatgggccccaccacgctctcaagagaacgcacctgcaataaaacagtcttgtcggccagctgcccaggggacggcagctacagcagcctctgcgtcctggtccgccagcacctcccgcttctccgtggtgacttggcgccgcttcctcacatctgtgctccgtgccctcttccctgcctcttccctcgcccacctgcctgcccccatactcccccagcggagagcatgatccgtgcccttgcttctgactttcgcctctgggacaagtaagtcaatgtgggcagttcagtcgtctgggttttttccccttttctgttcatttcatctggctccccccaccacctccccaccccaccccccaccccctgcttcccctcactgcccaggtcgatcaagtggcttttcctgggacctgcccagctttgagaatctcttctcatccaccctctggcacccagcctctgagggaaggagggatggggcatagtgggagacccagccaagagctgagggtaagggcaggtaggcgtgaggctgtggacattttcggaatgttttggttttgttttttttaaaccgggcaatattgtgttcagttcaagctgtgaagaaaaatatatatcaatgttttccaataaaatacagtgactacctgatttggctcctctcctcctgtctcagtttctggcctgcccccctccaacacacatacacaccaaccccagcactgactcctttggcccagaggtggaagagcctctcctcaaagctggctctgaagctgtgtccagtcagtgcagcccagtggacgcctctgaaccacagttctgatcccagctagatcgcagggtcatcaacggcagggtcctgtcctagagatagtcgcacaaatggactgaaaggcggggactgagaaggctcctctgaggcaggcccatcatgccatgggagcacacagagaaggggtcagcccagtcaggtggcaggactgagctgagacctacctgaaagatgggcagtcccctagccgggtaggggaaggacggaagggcattccagttcggggggacgacatgtatggaagccctgaggcaagagaagcccagacatcaaggaactgaaggaaatccagcgagactgggtgagagccccgagcagcttggagcccagccgggtgaagagaggaaggcaggggcaggccctgcagtgggtgagcctcttgatgctttggggagaggggtggcattcactgctttagtctcacaggcagccaaaacatgccaagtttggatctacagtggtgagaaaggcatggtcctgagctcacagggagggcacgggactcagtgttggtttgaagatctgaaacaaaaagcccaaaacaattgcaaaccacacaaggcagagtacaaaccactatgcggtcacagccaaattacaaaccacagaaagctcaactttctcgtggcaagtggggatgtgaggaagaagccgcctcaacagcgcccagtggcacattcctgtaatcctcctactttgagaggctgaggcaggaggattgcttgatgccaagagtttgagaccagcctgggcaacatagcaagaccctcccattccagtggggctatagtggagggatgggtcagaatcctcaagggctcttctcattctccctcgggggaatggggaatgagaggttaataagcattgtctttaacttctgagcttctcacacaggagctgggcaagggtggagcagagacagaagtcagtggaataaaaagaggtccttccactcatctgcacttggcctcagagggcaggggaagcctggcccaatcccagggccctccttgtggcagagagatcaggcctcggctgggttttcctggtgcatcccagtcaccggagccagcggcgagggtggagacattgggagtggcaggccattttccagggccccagcttctgggcccccttttcctgccacctggttgtggcttggcatttggtggtgcagtaaagacggtagagtatagtggataacttggggtctgagcaaaagcacctgccttagcattccggttccagcacttacctgccttgtggccttgggcagatgccttagagtttctggacctcaatgaccctgtccacaaaatgggggtataatggtacctgcctcctgagctgaggattggatgaggctacaggaaggaggggggtgtgcagtgctcaggaagtgttctgtgagcacctgccgccactggctgggtgcttcctgcttcatgggctgcctttgaagctctgcatccatgagctcatcggagccttaaagcaaccatttgggctggatgccattagttcccattttgctgaccaggaaactgaggcccagagaagtgaagtcactactgcaaggttatgaagtaggaagtgacacagccggaatctgaaccagatctaaccctgaggagtccaagcccacagcagctgggctttagggtaaatggtagtttaaaaacagacagacttcaggcaggccagagccagagccagtggggaggccaggctgaggctggcgtcccagtggtggggtctgaaatgggagctgcccccttagcagtaagggtacctgagaaaaattctggtctagtagttgagtcaaagatgggctgtggtttcccacaggattgggctcaaatcccaggttgagactcactcacaagagtgagtcttcgtgctcactaagtcccaaggggccacctctgccacttcaataaacttggagcagcgatttaacttcccttggcctccatttacaagtctgcaaaatggcaaaggataataatctgtaaaggaagacgatacaaatatccaccaacttgggttgtgccaaactttttttttttttttttttttttttttttttttgagatggagtctcactcttgtctcccaggctggagtgcaatggcatgatctcggttcactgcaacctctgcctcccaggttcaagtgattctcctgcctcagcctcccgagtagctgggattacagggtcatgccaccatgcccggctaatttttgtattttggtagaaacggggtttcaccatgttagccaggctggtctctaattcctgacctcaaatgacctccgcctgcctcaacctcccaaagtgctgggatgccaaactctctctcttttcgcctccccctacccccccatgcccccccttcccccccagcctaggctggaatgcagtggcgccatctcggctcactgcaacttccgcctcccaggttcaagcaattctcctgcctcagcctcctgaatagctgggatcacaggcgccacgccccactaatttcttttgtattttagtagagacggggtttcaccgtgttgcccaggctggtctcaaactcctgagctcaggcagtccgcccgcctcggcctcccaaagtactaggattacaggcgtgagccaccgcgcccggccgtgccaaactttatagacatcatttcacttagttcatacccaggctggatggactgattaaaacgcagcacccgctcaaggtgtgcggaccctgcccaggcttgccggcaggagtcactagagaaatctggcagtagaggagtggaggccgggcaggtgaagcctcttgcaccacacttactggaagcagctgagcggggtctcaaagcccagcgcactcggatcccaacgcccacgccttctcccaccgcatcccggtacccatgcttctcagcggcctataagtagtttcccccttgggccctatgttttgaaagacttttactgccagacaggctacattattaaataatcatgacttcccttcccattttttattaatcaaagacaaatagaccgcactcagcttctaatggcccctgggcaagcgctgaggggagccggctccagcccaaagaagagaaatgcctagaccgggagtcatttccagttcagcctcgcaggtctaccagaccagctcaaaacctgtcctgagaaagtgactagagaaggggacttaccagggatgcccaaccagggccgcctgggatcctcgggctcccaaggatcccctcacttcccagagggtggctctggggccactcctgagtgtcactcccagtgtgaccagcaggtggggcaatgaccacggaagaccctgaagagctgcaactcccaggcccagcccacggcataaatctgtgtgcgccggtgtttaagtcccatttgtgggtcaggccgggtgctagggagatgggaatgaataaaaagaaagaaatcgtaaaatgaatcaagtccccttgagtcccccgttcccagcacatcacttcctgagccccaccccagactagggcaggcgcctagagcagtcagcctctgtgtctgctggtttgagccaactgcagatcaaaaatattcaaaacacacagggtgcggtggctcaagcctataatcccagcactttgggaggctgaggtaggtggatcacctgaggtcaggagtttgagaccagcctggccaacatgatgaaaccccatctctactaaaaatacaaaaattagccaggtaagctgggagcggtggctcacgcttctaatcccagcactttgggagaccaaggcaggtagattatttgaggtcaggagttcgagaccagcctggccaacataatgaaaccccgttcctactaaaaatacaaaaattagccaggcggtagtggtgcgcacctgtagtcccagctactcaggaggctgaggcaggagaattgtttgaacccagggggcagaggttggagcgagctgagatagagccactgcactccagtctgggcaacagtgagaccctgtctgccccacccccccaaaaaaaattagccaggtgtggtggtgggctcctataatctcagctagtcgagaggctgaggcccaagaattgcttgaacccgggaggtggaggttgcagtgagccgagattgtgccactgcacacttgggtgacatagcgagactccgtctcaaaaaacaaaacaaaaaaaacacaataaaatatacaacttttaaaacaatacagtataattatttacatagcatttgcattgaattaggtgttataggtaatctagagatgagttaaggtataaaggaggacgtatgtaggttatatacaaatatgacaccgttgtatataaggaacttgagcatccacagattttggtatcccaggagggtcctgaaaccaatccccctaggataccgagggatgactgtctatattttcacagatccttgtactgtgccctcttagtacggcttgtgattttgtatctgagctgcttattataaaacatttctttttgagacggagtctcactctgtcacccaggctggagtgcagtagtgtgatcttggctcactgcaagctccacctccccggttcacgccattctcctgcctcagcctcccaagtagctgggactacgggtgcccaccaccacgcccggctaatttttttgtatttttagtagagacggggtttcactgtgttagccaggatggtctcgatctcctgacctcatgatccacccgcctcagcctcccaaagtgctgggattacaggagtgagcccccacgcccagccaaaacatttttttttagacagagtctcgctctgtcgcccaggctggagtgcagtggtgtgatctcggctcactgcagcatcaacctcccggacccaagcaatcctcccaactccacctcccaagtcgctgggaatataggcacagaccaccacgcccagctaatttttgtattttctgtagcgaagaggtttcaccatatcacccaagctgctcttgaactcctgggctcaagcgatccacctgcctcggcctcccaaaatgctgggattacaggtgtgagccactgcgcacgacctttgtaacacatttttatgtgattattcaatcacccacgtggattgtgaacgaggtagggccaaggctatgtcagtcaccactatattcccagtgggcacgaggcagcctcgggtccagaccagagcaactcaaggtaatgtatgttgagttaatgaatatacaggaggcttagaagggaggcatcagatgccccaagttggaggtgtaagcacgacagaaatgcttttttttttttttttttttttttttagacaaagtctcactctgtcgcccaggctggagtgcagtggcgtgatctcggctcactgcaacctctgcctcctgggttcaagtgattctcctgcctcagcctcccaagcatctgggaatgcaggtgcccgccaccacacccagctaatttttgtatttttagtagagatgggatttcaccatattggccaggttggtctcaaactcctgaccttgtgatctgcctgcatcagcctcccaaagtgctgggattacaggcatgagccaccgcacctggccagaaacccttctcttaacttgtttcactttctgctaaacctcaggtccccgctcagccatcccctcctttcagaagccctcctgcctagacacccttccaccctgcttcatgaccattctgaggacagggctgtctcccccaccaaactgagctacgggagggcagggccaggtctatctctatcactgccatgtcaccagcatcacagggacaagccctgacatacagtagtccctcaacaagaccctgcggagcgggtgagcagacacacgtccttgccatggcaggctgtggccagtgccatcgtgcagccgaaaaagttctgagggcccgctgagggaggagtggttgcatcttcaaggaggaaaaatgtaagaaagaatttgaagggcaagggtgtttttgacggatggaaaagggaaaaaacagttccaggaagagtgagctcaataagcaaagatgcgggggcccaaaatgtcacggcctctttgaggaaaccgcagccatctgttgcggcctcagccaaggcctgcaggggggtgggagcgcgggagctggccaggagcctccaggtggcgcctgagccctgggagctttccaaggctggcagggactgccagatagagctctctggacaggacccgggcagctggcagagaggatgaacttggacagtcaggggccaggatcccatctaggaggagtttccaaatcacccccgaggggcaaagggtggatggggggcattgtctgaaaacctctggcctgttagacagtgtagacacccaggtcagaggtggggtgaggggaggggtctgcagcaaacagtgagatgtcaggccctgggggagtaagagcccacagaaccccagcttctacgttgcatcctcacttccccttaatcctcatctgaaaaatgggaatgagagcagcacccaccgcaggcaaggatgctgtggtccaacgctcagctctgcctggtacacagtgagccctcagaggccagatgggcagaactgacccaccttcgggggtgacacagagagaggaggtgagcacccttcaatgcccttctccagaaccccccatcccttcctcaccatcctctgttgggggtaggagggttggccaaggtttggccaggcgtggtgacaaagtcaggtcccaatctgatgtttgtcaacctgttgtgcttttgcttttaacaagggctttttttttttttttctttgaggcagagtctggctctgtcacccagactggagtaaacatctcggctcactgcaacctccgcctcccaggttcaagcaattctcgtgcctcagcctcctgagtagctgggactacatgtgtgcgctaccacacctggctaatttttgtaattttttttttttttttttgagacggagtctggctctgtcgcccaggctggagcgctgtggcgtgatctcggctcactgcaagctctgcctcccgggttcacaccattctcctgcctcagcctcccgagtagctgggactacaggcgcccgccaccacgcccggctaattttttgtatttttagtagagatagggtttcactgtgttaaccaggatggtctctatctcctgacctggtgatccgcccgcctcggcctcccaaagtgctgggattacaggcgtgagccactgcgcccggcctaatttttgtatttttagtagagatggggtttcaccatgttggccaggctggtctcaaactcctgacctcaggtgatcctcctgccttggcctcccaaagtgttgggattacaggtgttagccaccatgacaggccagcacccagctaatttttttattattatttgtagaaacaggttcttgatatgttgcccaggctggtcttgaactcctgggctcaggggatcctcccgcctcagcctcccaaaatgcagggattacagatgggaatcacctcgccctgcctacttactttattttttaaatttttttttaatcgcagtaagatacacataacataaaagttgctattttaaccattcaaagttacaattcagtggcattcagtgcattcacactgttgagcaaccctcactactatccaattccagaacattttcatcaccccaaaggggaaccccaagctcattcatgggtgaccttgacctgtttttaactctcccagacaccccttgttctgctttattgtgatttgaaacgtggttacctgggcagggtgggggaagtcaaaacacccgaaccagagccaggaggtggtttccttttaaattgtatctgtccaaataacaatagcaacagctgcagcaatggcaatcatagtgacatttcttatgggctttattccaagccctgagctaatttgcttttcagagggaattgcttaatccccaaagccgccatgcaagctaagtgctagattatgatcaaaaggaaaccaaggtgtcccggagtggatagacgggcctgctccaagcccacgcccactcgctgtgtgagtcgggacaggtggattatcatctctggacctggactccgtcttctgtagaaaggacttattgctgggctcagaggctcccacctgtaatccaagcattttgggaggctgaggtgggaggatcacttgaggtcaggagttcgagaccagcctggccaacgtgacgaaaccccgtctctactacaaatacaaaaaaattagccagaggtggtggtgcacgcctgtaatcccagctactcgggaggctgaggcaggggaatcacttgaacccgggaggcggagtttgcagtgagccaagatggtgccattgcactccagcctgggtgacagagtgatattctgtctcaaaaaagaaagaaagaaagaaagaaagaaagaaagaaagaaagaaagaaagaaagagagagagagagagagagagagagagagagagagaaagaaagaaaagaaagaaaggaaagaaagaaagaaagaaagaaagaaagaaagaaagaaagaaagaaagaaaagaaagaaagaaagaaagaggatttataataggttgccctgtggatggagtgggaggaagcgctgcctacccctcgaagagttggctgctgttgtcctcatgggaggctcaggcctcacgtaccgcgcctctccccaagtgtggattttttgttttaacagagggggagagtaggaaaggggaactgggactggcagtgcagtggggctgggtggggggagttcccactcaccctcccccaccctaaacgcctactcacttccttccatgctcatcagctcactcctgagcaccctccatcctgggcctctctgagggcagggagtggtcatgagaagcctgtgtggatggcaggctggaaatcaccccggcagggcccagggtggagcaggggcttgtctgtgtccttaacaccaggcaatcagcactgctgaatttcagtggaaggttgagggtttttttgggttttgtttttgagacagtgtcactccgtcacccagtggcacgatctcagctcactgcagcctcaacctcccacgttcaggtgatcctcttgtctcagccttcctaggagctgggactacaggtgtgcaccaccacgcccagctaatttttaaaatttttttgtagagacaagttctcgatatattgcccgagctggtctcaaactcctgggctcaagggatcctcccacctgaacctcccaaagtgctgggattacaggcatgtgctatggtgcccagccaagtatctgttgaatgaatgaatgaatgaaatcttggtgagggctctaaggacacataacatgaggtcaggctctgcaaggaggcttttatttattcaggaccctggggacaggcacaggacttaggtttgtgttctggggcagtccctgggatccgcagcccccacccttcatctgccagcttctccatctgtctccccaccacctgcacccccccagttctcatcttgcagccagtcaagctaggtggaatgtctcaggccctttttgtaccaagcacatgtcctacgtcatcacccacaatgcagcagcctccccttcctcccgttgcccctttgggatgccagggctcccaagcctggtgggggaccagcggcaagggaaggcagggagcttttccaataactgtggtttttgtggagcagaaaggggctggctcttggagtggcttggtagagggggagggccatcccctggggacttggggtgggcagttgggcctcctaagtggacgcagattggagccagcacccagaccagagcagacctgactgtacagaagcctctgggaacttctccgccttctaaatatttagacaatgagatggatggggaatccagggccagagcaggtcggccaggccactggttattttgagagaaccattctttctgcactccaggataaacgtttcctctgtccctcactctcttcccagagccagcagcgactgccctgccgcaggagaaacagcagctgatcggccccagagtttgggggccaaggttccagcatccgcagccatcagccatgtccctgattttctggctcctgtcgcccgaagacagggcagagatcacagggtcagcttgaaatgtcagcagagggagcaggcgacgctggcttctgctttggacgacgttcccacggcgctgccgctggactgctgtgtgggaggcaagggctccacctgcccctcgccccaagccgacaaaggcacgcagctcccctcctttcccacaggagcagagggggcccttgggtccctcctccctgaggcgagctgggaaaggggtgtctgcgagtctccgtgggcaggcccgaggcacaggcagcagacccagagcttgagtcgctggaagacagccttgcggaaaaggatgaagacccaggggtccaggatggggttgaaggcgtagaagcggaaggcaaggaggtcccccatctcactgctgctgtcaggggcgacagcctgggtgaagcagcggatctgagggcagggtgagggcgtcaaggagcacccaggagtcctcagcctccccaccctggctccctcctcccacttgcttaccagggatgaggtaggggtgacatgtcagaggggaaggagataagataaagactaagtaacaaatgtatctggggaacacagggagagaaagccccaggaaattgccagagatgcctaaggggagagggatgggggccaggtatgtgggtccccccacccttggaagctgggaggaccctcgggctccacagatttttgagtataacgtccctgcaagaaggtggcgccacccggctgggccccctgaaactgccgcagagctgcggtggtgcctgtgtgtatctgtccacggcatctgagtctctgagtcagagtaacccccaaaaaagatttaaggaccccccaatccggcctggcctcttgcattttacagaaacagaaactgaagctcagaagaaaggtggcacgaccaggtgtcacagacactgagtgggtaccagggtctgtgccactcccattggggaggggcaggacggggtccccgcaggaaaccgaggtgcagaggcaagggtggggcctgctctgaggcagaggggagccaggtaggtgggagatcaggctctacaatggaaggacccaggaccaggacctggctctgtgtgactgggcgaaagacactgcccctcatctgtaaaaacggggatgggagagaacgttctcttggtttcctgccaaatactgtggaatgggtggctatgatcattttgaaaattatcttaggaagtatctgtaagccactaagcacggggcgggcatagagaagtgctcaatgagtggtggtcttgtcattacaggggtggggaaggatgggggatgcatttcatcatggggggctcaggatgcctaagctgggagacaaggtatcagaagaagtcagatgcagaaagacccctccagaaagccaggagctgtctgactgaggaccaagcctctgtctgatttgtttttgttttctttgtttttgttttgagacaaggtcttgctctgtcagctaggctgggatgcagtggtataatcacagctcactgcagcctcaacctcccaggccggagcaatcctcccacctcagcctcacaagtagctgagaccacaggcacaggccatcatgccaggctaatttttaaatgtttcatagagatggggtttcaccatgttgcccaggctggtctcaaacctctgggctcaagtgatcgtcctgcctcgcctttctttttcttttttttcttatttttttttttttttttttgggacggggtctcactctgtcacccaggctatagtgcagtggcacgatctcagctcactgcaacctccgcctccggggttcaagcgattctcctggctcagcctcccaagtagctgggacttcaggcatgtgccactacgtccggctactttttatttatttatttgttgtatttttagtagagacagggtttcatcatgttggccagactggtctcgaactcctgacctcaaatgatccgccggcctcggcctcccaaagtgctgggattacaggtgtgagccaccgcatccggtcctgcctcggcctttctacatgctgggattacaggcgtgagccaccatgcccacgatgtctcacctcttttgagcctcagtctccccatctgtgacatgggcacaacccacagagctgccctcctcctctccccactcctcccagctccggaggggactcaccgtgagaggcagggagcacacggccatgaccactgtcatgagggccagcaggatcaggtggtccacctcgtcctctccggtgcgcggccgtggacccagagagccctggtggcgcttctgctggcggtacatgcggcagaggctgagggtgaccgagccgttgcagaggaagatggcagccaccagcagggccaccaggccggcgtaggccagcgagaaggcggcgccgcccggctgggcccagcgcatgcggaggaagcaccagctgccggggcagtactgctggtgttggcccaggcccagcaggggcagcgcgcagaagaggacgcagaaggcgtagatggctggcagcgccaggcgggcgcagcggggcccgtccagctgcgcgtagaggtaggggtggctcagcgccaggcagcgctccacggccatggcaaagaggatgagcatggacgccaggccgaagaaggtcatggcgaaggcgaaggcatcgcacagggcggggccgcctcgggccaggcccagcagggagctgttgcgcgcataggccacgaacacggccgggctcaggaagctggtgcccagcaggtcggtggccgccagtccggtcaccagcaccgcgaaggccgaggggcgcgccggtcgccgtgcgctcaggatgcccagggccagcccgttgcccaccacaccggccacgaacatcagggtgctggtggccggccccaccgagccccgcacgtaggtgaggttcctgcacgaatccgccatcccaggtctgggctggagggttcccaaggtggggggtcagagggagccagggctacccccaccacccagcccactcagatgtccctgctggccagtccttttggcagctggggcctcccagccaacccccagttctcctgtgtgtgcgggtatgcagtcctctcccctctggcttctccagtatctctctctgtctctccccaccttcctgtttctctttctctctttcttttctttcgtttcttttgagacagagtctcactctgttgtccaggatggagagcaatggcatgatctcggctcactgcaacctccacctcctgggttcaagcgattctcctgccccagcctctggagtagatgagattacaggcgtccactaccacgcccagctaatttttgtattttcagtagagacggggttccaccatgttggtcaggctggtctcgaactcctgacctcaggtgatccatccaccttggcttcccaaagtgctgagattacaggtgtgagccaccatgcctgacacccaccacccccccaccacctcctgtttctttccttctctagctctgtttctgccattaaagagacagagaacatccgggcattgccagttctttccctccctgtctctcggtctcttgctgatatctccctgtctctgtcccctcccttgtccttgtcctccccgtacctttctccctctaaccccacaccctctacctgctcctgctctgtgttgctgcatccccagcccctcaccgcacctctccagtcttgcccaggctctcctgtcccgtgcgtctgtgccttcacttgctttgctcctcgtgtctctcgctgcctgtgtcggtctgtgtgtcagcttctccttccctcctccctccgtccctccctccttcccaccctcctcagcttgcctgctcaccccagctttttcatttcctctctctgccccgccctccctcactgttctccagagggccccctggcacactccccactccccgtccacccgcccaatccaggacatccatctcccatcgctgcctccactctcctccccacatcctctcttggttcccatcactgagccacctgccacctccccacacacaggtctcctccctcccccagtgtctccctctctggcctgggtggggaattcctgagtcaccatcacttaggcttggagcctcccggggtagtagggggcctctaggagggacctgaagagcacagttgaccaggcttcagtggggtggtcttggcctgggctgtctcagggtggcctctgggatctattctgggctccaggccccggggctgaggacattgcccagggattgagaaatgaccaggaaattcctctctgatgtagtgttttccagacaccactgagagttctggtccctggacacaattcactccttccagaaagctgaggaaggaggcttggccagagagagacatgccagtccctcgagcctgtccctgggcacccagctcaccctgcagagacccgagaagaaagcatgaaggggtgtatttggtgtccagttgtcagggacaggcttgggagacttccatggcccatgatggaaaggtagcactgggccaccgtccgacttctcgcacagcacccctaggccccaggccaagctctggtgaccttgaccttcaggaatcatattttgatcacaggaagctgtccacagctccaacattgctgccatgtgtcccccaccctccccaaacacagccaagccaccaccgctgcagcctcgggccagtgtgacagacccacatgttcccgctacccgcacagcgttcacgggtctcccttcccacggagtcggtggcttcccaggcagcctcccagcccaaaagggccagataaaacctcagagaccctctctgagccccgctgtttctcagggggacggtctcagatccattcgacttggcttcctgtttccatctgaccaccttttttcttgctgcgagatggtcccaggtgaggagagggagctggtagacttcagcctccttctctgtgcgtggggtaacacgggcctcagggacctggtggccagcctcggcctgcagcacatcccagattggtctttgtaacaaggagagaggctgtgcgggtgtctcttgtccaaggccaggagggatgtgtccaacccaaggactggactgtgggcagctgccgtcttgccctctgtaccccggtgtgtgaccacaacccctttgcccctcccccccatctccctatcacccttgcccagctggcacccgcagcttccagcaggatggacgcccaagttccagccccaccgtggctccctaagggaccccccagccctgctctgggggtgcctgtacatgtgggctccaggtcctgccacgttgtcccgcctcatgccgtgaggtccccagacagaccagagggaactcaggaagttatatcatattaatgaaggatgatgcctggcaggcgtgcatcttgtttcggcatcgggggggcctctggttcccggagactccctctctcgcttcctgttacaaggacggttaacattcaggaagtcccctctgctcccatgcccagtgggaccacagtcaaacccttgtcccttccaggcctcagtttcttttttgttgttgtttttctttttgcttgtttgtttttgttttgagatggaatcttgctctgtcacccaggctggagtacactggcatgatctcagctcactgcaacctccgcctcccgggttcaagcgactctcgtgcctcagcctcccgagtagctgggattacaggcatgtgccactgcgcccaatttttatatttttagtagaggtggggtttcaccatgttggccaggctggtcttgaacgcctgacctcaggtgatccgcccgcctcggcctcccatagtgctgggattacaggcgtgaaccaccttgcctggctgttcgtttgtttttgagacagggtcttgctctgtcacccaggctggagtgtagtgctgcaatctcggttcactgcaacctctacctctggggttcaagcgatcctcccacctcagcctcctgagtagctgggactacaggcacccactgccacgctagctaatttttgtatttttgtaaagacagggtttcactgtgtcacccaggctggtctcaaactcctggactcaagtgatctgcctacctcggcttcccaaagtgctgggattataggccaccacgcctggcctcaggcctcagtttccccgccgatgccactaggagtcatgagccctcgcaaccccaggatcggttctgtgttcctgcatcaggagcaggtaggggtggcagtgactgtgactccctcctaatgaggggactgagttccccagagtccgtactggcgccagacatgcctcagtcaccttgccctgaaacccagcctcctgcttggccgtggccccagctagccgggccaagcccacagcagggtccacacgggggttccactccccagccaggtgccttggggtgagaaatcacccacggtgcgttgtgccaggggcagcttccagggtgggcggagctatggaaggaactgccctgggggcgtgggtccgtagcctccatctcacactctctccacccatggcgaggaacaggaccaggcctccctgagggggaccctgaagcagcagggaaaaagaggaaggacagctcagagaccactgagattagggacgcacacacagcacccgggaggggagagagattgaggctagtgtgctggggactgtgggtgtgtaaccggattgtgactctctgtagagttagtgcggcccatgtgacctaagtgagcatttttctcagcattgattgtgtttgcgtgtgtattgtgtgtatatgtgtattgtgagctcgtgggactctgtgtgcacatgggcacacagctatgttgtagttttgttttgtttttgagatggagtcttgctcttttgcccaggctggagtgcagtggtgccatctcggctcaccacaacctccacctcccaggttcaagtgattctcctgcctcagcctcccgagtagctgggattacaggcacctgccaccacgcccagctaatttttgtattttagtacagatgggatttcactatgttggccaggctggtctcaaactcctgatctcaggtgatccgccggcctcagcctcccaaagttctgggattacaggtgtgagccaccgtgcgcaacctagtttttttgagacagggtttcactctgtcacccaggctggagtgcagtggcacgatctcagctcactgcaacctctacctcccaggcttaagcaatcttcccacctcagcctcccagatagctgggaccacaagtgctcaccaccatgcccagctaatacttttattgttttgtagagataggatcccactatgttgtccaggctggtctcaaattcatgggctcaagtgatcctcccaccttggcctcccaacgcactgggattactggcatgaaccatggcacctggccgagaatggtttttggtttttttgtttgtttgtttgtttgtttgtttgagatggagtctcactctgttgcccaggctggagtgcagtggtgccatctccgctcactgtaacctctgcctcccaggttcaagcgattctcctgcctcagtctcccaagttgctgggactacaggtgcgagccaccatgctcagctaatttttgtatttttagtagagatgggatttcgccatgttggccaagctggtcttgaactcctgacctcaagtgatctgcctgccttggcctcccaaagtgctgagattacaggcgtgagccaccgcgcctggctgaggatgggttttgaagttcatctccaccactcaccagtcagtcaccatgtgacctgagaaaatgacttcccctagcaaagctttgatgttcttcgtcaaatggctgccttgaccttgttggggtgttatgtgaagataagagacagttccccctgcctgcctcccaggaagccctcaaatagctgttgatattattcattcaacaaaccgtaaccagcagtttactgtgtgctaagagctggggacacagaggggctcagagggcacagcccaggaagagtgttctcaaacaggtttgtccacccagtgtggggatcctgagcaggggtgcctgcatctgtttttttttgttgttgttgttctgagatggaatctcgctctgtcgcccaggctggagtgcagtggcgagatctcagctcactgcaacctccacctcccgagctcaagcgatgctcctgcctcagcctcctgagtagctgggacttcaggtgcccgccaccatgcctgactaatttttgtatttttagtagaggcgggatttcgccatgttggccaggctggtctcgaactcatgacctcaagtgatccgcccaacttggcctcacaaagtgctgggattacaggcttgacccatcacgcccagcccaggcctgcatctggaagtgccgcagacctaagatcctggcttgccctgggcctgaccctctccggactccctggtttccgtcctcctggctctggccctgggaggaagtgggccttatctcatgttctgcacacacgcaccaccagctgctcgtgcctgccaggcctcccgtctgcctgctgtgccctctcactgctttgagaaactgctatgtgtgtcccagacctgtctcgccttggctggttccagcatccagagccagaggcctcctttctctatccactcactgccctccaccgcaaatgggccctggcctaccttctggtggctgcacctcaccttgctccagggggcataacccagtctcctgcctaccctgcctctgaatgggccgtgcccctcacctggggatcccctcatttcctagccttcaaggcctcttggtcaccccctgagcctctcctgagcggtcgtccatcagatcctcccactcccattccagtctcaaaccccagctggttacctctccatgcctgtttctctctctctctctctcttttttttttttttttttttttttttgagatggagtcttgctctgtcctcaggctggagtgcactggtgcgatctcggctcactgcaacctctgcctcctgggttcaagcgattctcgtgcctcagcctcccgagtagctgggattacaggtacacgccaccatgctcagctaatttttgtatttttagtagagacggggtttcaccatgttggccaggctgtcttgaactcctgacctcaaatgatccgcctgccttggccttccaaagtgctgggattacaggcatgagctactgcgcccggccccatgcctgttttccttgtctgtaaaatggggataaacagagtcaccttgagggctatcgtgagcattgagcaagatgggactgttgaactgttcccctaggaagcgatggccaagattgcagctcctgctggctctaggctttccctcccccgctgtactccttcggccaagccaagcgctgctctgagcgcctgggttggggtgcagcgtgcgatgtgggtgcagagggaagacagcctgaaacagggcagctgagagcccttggggtctggaggaacaagcacctcgccctgcatgcacctctacctcttggcctgtctctgacccccagcatgggcctggccccagagctgacttcacccctgggggtggcaggaagcagcagctggtgaccagaagctggtgctgctacaaggcagtaaatttaataagattattcggatctgttctcatggaggctgggcacgcagggacctgccctgtccctcctggattgtgacttctgacttctcctttcccgtagcctcagttccccatcctccccctccagaaagacacctccttctggtcccctctgtgtcccactcccaccagccctcccttcccccaacccaggtcccattcagctgcttacatctccatagtttctgtcccccaggaccaggaatgtgaaggaggaagggtttgcactacgcagctctgagattccagggctcgaaggatctagctcccaagagcctaggctcaggaactccttacacttcttctgagatgctgaactctggaatcctagggtgcaggaccccaggatcttggccccataggattgaaagatgctggaattccagccctcagaggtcctgggatcctagattcctttgcatttcaggttctgagctgtaaggatgcaggatctgtgaattctggaatccttctagctccttcctgcccagcttctctccccgctcctcctccacaccctagctcatctctggctcactccctgtcccccgtctcccccggggctcccacagacatgatgcaaccaggccggagccaagccagctcagaggtgggaagcaggagggagatgtaattacagacgctcctgcctggatcctacaggaaactcagagtaggggcccgggggaccctaatccaatgtgaataatggagcagacttgtgcacattccccctgtggaggggaggcccagcaagccacctccagccagacccagggtccagcctccaccagccccaagctggggagcctgagtattagacaagataagaagagatgagggagaggagagggggtgatcctccagcccttgggccaaccaggtaaaataattggccaaacctacagcttccctggcctgcattctccccattttcaatggagacacagaacatttcatttttcttttcttttctttgcttttttttcttttgaaatagagtctcactctattgcccaggctggagtgcagtggcgtggtcttgtctcactgcaacctccacctcccaggttcaagcgattctcctacctcagcctcctgagtagctgggattacacgttcatgccaccatgcccagctaatttttgtcttcttagtagaggcggggtttcaccatgttggccaggctaatcttgaactcctgacctcaagtgatttgcccacctcggcttctcaaagtgctggatttataggcgtgacccaccacgcccagccattttatttctcattcctccataagaagcccccgacacaggcttcaggttaaatggcaactggtccccagcttccttgaccagaagacaatagggcatggtggggactttggtgagctggaaagcccaggcaccgtctcacagcctatgcgtcaccagaccttacaatttcaaagaagactttgcaattccagaggaatatggactttgatgtgaaatatctgtgtttttcaattggcagccaagtcaagaacatctttaaacatcatgtaaagccataaaaatataactgcggccaggcgggtgggtcacgcttgtaatcccagcacttgggaggccgaggcaggcggatcacttgaggtcaggagttcaagaccagcctggccaacatggtgaaaccccacctctactaaaaatacaaaaattagctgggcgtgatggtgcatgcctgtaatcccagctacttggggggctgaggcaggagaattccttgaacctgggaggcggaggttgcagtgagccaagatcctgccgctgcactccagcctgggtgacagagcgagattccgtctctctctctctctctttctctctctctctctctatagatagatagatagatagatagatagatagatagatagatagatagatctgcaagctacgtatgtcctgcaggccagcagtatgtgaattggaaaacagagggcaggaaccagagctgtcacagtcatccctttgtctccagaaaaatgacaaaatagaagaagaatgaaggaatgtactcattattttctttcctctccctccctctagccatgtttctctcttctgggtccccaaattttattaccaccatgttccagctcagatgtcacctcctccaggaagccctcccttacctccaagctgagtcaggagttatctctgcgctcccccacccagcactgcgcactctgggtttttaccatctggggacaggtctttctctcctactggactctgagccccaagagggcagggcagggcagagccaaggctgtcttggtcacagccatgtccctagcattgcccagcgctggtcagagagtaggtactcagggagtgtttggaagaatgaatgagtgaatgaacaagtgagcagggaaaaagtgcagggctttaggacagaagtgggcctgcggtagaggggaaccaggtgtgaaaacaggagtcgttaagggggtgagaagtgtgggatggggactggggaccctaagaatgtccaagccagtggggaggagaggagagaggatggcggaggggttcagggagcactggagtacccccgtcagcgctctgttaccgcctagctttgtgactctgaataaaggacttcctttggctcagtttcctcttgggtatcatacaagtagttagctgtcttctggggctgtcgggaccattaagttcaggatcgaccgtggaggagagagcaccgaatactcatctcctccgaagctttggtggagtcgtactccctccacgtccacccctacccccaacacacacactcagaaggaatgagaacggacacagcttcccctacggtggccccaagctctgtgcgtgcctcagtctccctgaaagcacaggcaccaccacagttaccaagtttattggatccatactttggcaggggagggtaagctgtccggagggctcagagcagaacacaaaagaggcgcttgtcgcggaaggggttctccgcggcgggtactggcgtcaccagcgggtcatctttggcatgcgtctcgcagaaagccaggagttccgctgctgcctgcgacacctgcgagcacccgggtggagatgtcaccgccctgcccggctccttggagccgcccacttaggccccgcctcttgccctgtcccctcctcccaccttgccccgccccatacaggcctttccccttgtcttactccgccccctcgtcctggcccctcccctgtcctaccccgcccctcgtcctggcccctcccctgccccatccctcccctcgtcctggcccctcccctgttctgcccctcccctcgtcctggcccctcctcctgccctgccccgccccttgcccagccctgttcccaggggcatccttgcactatggctccgagccgggccgacacagccccggacagaccgcaggcccagaacccccgccctattccccaccccgacccagcaccttcatgcggtcgatgttcacctccagcttcagctgttccaccgtcttgcgggcctcggcaatcttggccatgttgttggacatggttgcggcggggaaggggttaaaagacgcgcgggagtgggggctgtgggggtaggttaggatacgtctgggtcccgaggtgggggcgagagggcgggccccggtaacaggtgcgagggtggaagggcgcgtgaatggggtggccaggggctggtggagggagggacagatgaaggggacaggaacaagaggagcgatggaggggtgcacggatggaggtagctaaggcaggtggggagagagcagggaggggcgagggagggaaggaggggcgcacagatgggaggctgagacagaaggacagggccacaggtgctggatcagaatccaggtgtcctcacccccgggggcagagcgagagccaggaggggggcccctcccccaggccaattagcagtggctccagggagaactgggaattaagatcgcggcgggaggggcacagagggggcctcattagggccttggcagcagctgccctctccgccaccctcagggagcccccccaccctagccctggtcacctcaaagcctcctctgctcattagcagccagggcagagggctgggggagcccaactcgggcacctgaggagaggcctatcggatggacagagggacaacgggacgcgcagaggcagagacagagtaatggagggagagactgaggcacgggagaaatgaagagacggggaggaatagagagagggagagactgggggaggaatgaagtgatggaggagaaaatagagggacaaatgaaggggggagcaaggaacagggtgatacaaggcgacaggcaccgaggggacaaagggacagaggggacagagcaggggagatggagggagggggtgtggggtgggagaggatggggagatggagggagggggtgtggggtgggagaggatggaggagatggacggatggggtgggagaggatggggagatggagggagggggtgtggggtgggagaggatggggagatggagggagggggtgtggggtgggagaggatggggagatggagggagggggtgtggggtgggagaggatggaggagatggagggagggggtgtggggtgggagaggatggaggagatggacggatggggtgggagaggatggggtgatggagggagggacgaaggagagagaaggggaaatggaggaaggggggagggaggaaggagcagagacaccaaggagataaaggaacagagacggggagatagagggacagaggaaagaagggaaggacaaagagggagatggaggggttggggagagatggaaacagaaagtgggagagaggaacaaggcgagagacaggctgatggagacgcagaagaattcattcactcactcattcactcattcactcattcattcccaggcggagagacggtggccacggagcaggcaaagggaccagctgtggggccgggaccggagcttcctacctgttgctgctctgggccgggctcgcggcggtgacagaggctgggaggcagcgtctgggtccctccggcccgccccgccccctcccctggggcgcagcccctacggacccgcctcctcccggagccaccgtccccgccgccccgccaccttggggctccctctctgggccctctctcttgtctgtcagtcctatctttgtccctctccctgtgtctctgccgctgctgtcctattgtgtgactctctctgtgcctctctcacactcactagaaaacacagtctctctaggtgggccccgggcctcgctacatttaatccacagtcacaacaaacctctccagtgtgtcccacagagccgctcactcagccacactcgccacctcggtgtcaccacccccctccagcctcatgctcactgtccctcacacagacaaaaactatcttgccctgtcacacggtagcaccacacaacctcacgaatgaccttgctcaacacaacctcacacggttgccccaaatgccacacacagccgccaccaatggcagctccaagcgctacacagtcagataaattatctcagagcaccaaatgtaccacagtgtcacacataatgtctccaaatgtcacacacatttgcatgcctttttttttttttttttttgagatgaagtctcgctgtgttgcccaggctggagtgcagtggcccaatctcagctcactgcaacctccgcctcctgggttcaagccattctcctgcctcagcctcctgagtagctgggattacaggtgcctgacaccacgcccgtctgatttttgtatttttcgtagagacagggtctcacaatgttggccaggctggtcttgaactcctgacctcaggtcatccacccgcctcggcctcccaaagtgctgggattacaggcgtgagccaccgcgcctggccttgcatgccatttaaactctctcaatctcacaccctgtcccagtctcacactttctgtgtctcacggtggcatgcaattacccaatacaacctgtcaagtacacactgttttatagtatttcatagtaacacccagtcgcctgtccagtgacaaccatggaaggtcacatacattctctcacagtctcctggtgtcacacgcatctgacacattccctccatacacagtctgtccctgtcacacacacgcacgcaacccatctcctggtgtcatacctagctacccacgatggctcagtgtctcacagagtcccacacaagctcgcagcgtttcacacactcactcccacctctccatcatctcttgccttctacacacaaggcctccctcacgctctcgcttccgagtgccctgcacagccgcaaactctcgcatgcactgtcacaacgctgccatctctcaccagctcagtgtcacacatagtcacgcagttttgttttgttttttgagacaaggtctctctctctgtcacccaggctggagtgcagtggcgcgatcttagctcactgcagcctccacttcccaggctcaagcgatcctccaacctcagcctcccagtagctgggaccacagaggtacataaccgcacctggttaatttcttttatttttattttggtagagacggcgggggtggggggaggggtctccctatgttgcccaggctgatctcaaactcctggcctcaagggatcctcccgcctcagccacccaaagtgctgggattacagcaatgtgcccggatcacgcactttttcacaagccatacacagagtggccaacacagactgacactcactgtgtctgtcccacccaggccccctatgtgcctctcatgacacctgcccacaccacctctcagtgtacatcagtcatcagtctcactctctctcacacagaatctacttgtgtgacacacacagcaccgtatgctcaccatgttgcacacagccacacacactgccccctcacacgcaccgtcacacacggtctctcactcccacatacggtctctcaatgtcccatacagagccccaaagagtgtctctcccacacccgatcacacataacctttcatcagcacacacagtcacccacaatctctcagcatcaccagtaatctcagtgtcacacacagtcagcgacatgtcatctctgacatatgcagtcccactcagtctctccttgtcgcacataatctcatatcaatcagtcacacacagactcccagcaccacacaccatctcaccagtacaccatcatggcagtacacactcatggtgtcctggtcctggcactgcacaccatctcacggcagtcgacactcacacagtttcctggcgtcgtacaccatctcacagcagtacacactcacagatctcctggagtcacacaccatcacggcagtacacactcacacactctccagatgtctcacgccgtctcccggcagtacacactcacacagcctccaggtgtcacacgccatttcccagtgtcaccgcgaacaccagcgtcccccgctccccagcactccccttttggcgctcacacgcagcgtctgccggccacatgagggcgcgcgcagcacgcccaggcgcccaccctgccccgagaggccgcagggaggaggtggccacagggaggagggccaggcgggagatgaaggggagactcgggaccagaggaagcacggcagggagccagggaccggagggagaggacagaagatggacacagagaaattcacagacaggggagggagatgcagggagagtcagagagacgcagggggctatagggacacagatttagagaaggagcgagctagggactcagagagacagagacggggagggcgctgcggagagagggacaggagaggcagagacagacaggacacagagagaccggggtaggagagagacacccaagccgaaactcagagacagggacgaagacgcagacacacagagatggaggcagaggcggccagagagacaaagagatgcacagagggcgccttccagtggggacccgacgacggaggcggggcctgcagaggcgcgaccgaaggggaggggtccggggcggggtttctaagggggcgtgcccctcggtgtacctgggggcgtgtcccgatggacggggcttggggttctttctggacctggagaaggcgggagccctaggaagaggtggaggtggggaggagcatctttactgcagtcggcccaccctaactcggttttcaccgcctggacagggaagggagacgggcggggaggggaccccgacccgagtccctggtggagatttgggtctcggaccctagctcccctcccccctccccttgcgggctcaacggggccagataaaggagggaaaccaagcccacatctggaaagcatcaggcgcgccggacgtgccagggccccaggcccggctgcggaagaggggaggggagccaaggcgctcctcgccccgccatcggggtccgccggcgccgaggaggggcctgggcgtgtgccgagcctccgcgcctctcgcagctggtttctatcagcagtctggcctgggcagcccccgaggaggaaaccagctcagagagggggaagacagggtgacgatccagtcttccctcccgctcctccaccgcggccagaagctgggggatgggggagacggacagacagacactgcctgccgtgagcgcagcctccgttcctctcctgagctgcagaccgcagcagatgacctcagttcctgtcctgtgccccagcctcatgacagcctagcgcttgaaggcattacagtccccattttttggaagaggaaactgaggccctggattcggattccgttctgacgttaattattcaagaaatcatcaacaaacggcaagagtgaattccaggatcaaatacccagccgcctgggtgtttagtgggtctctcgagctcaacgcatccaatactgagctgattccatcgaccaaaattcgctcttatttcaggtttacccatctcaagtgatggtaaatctctgagtttttgttgttgttttgaaacagggtcttgcctgtcgcccaggctggagtgcagtggtgcaatcatagctcactgcagcctgaactcctgggctcaagtgatcctcctgcctcagcctccccggtaactgggactacaggcatgcacaaccatgaacaggttttgttttgttttttaacagaatctcactctgtcactcatgctggtgtacagtggcacaatctcggcgcgctgcaacctccgcctcccaagctcaagcaattctcatgcctcagcctcctgagtagctgggatcacaggcatgtgccaccaaatccggctactttttttgtatttttagtagagatgggatttcaccatgatggccaggctggtctcaaactttggcctcaagtgatccacctgcctcagcctcccaaagtgctgggattacaggcgtgagccactgtaaccagcctaactttttatttttttttagaggcagggtctggctatgttgcttaggctggtcctgaactgtgagccaccacacctgggctggggtcatccttgactccccgccttctctcacactccacaagtcaccaagtaagacatcctgttggctttatcttcaaagcaattccagaatccaatccctctcacttcctctgctgtccccacttgggtccagacaccgttccctcctgcttggactattacagtgacctctgcattgacctcctatcttctccctgtccccctcagcctgtttcccacagagcagccaaaaggacactgtttcaaactgtccccatataatagcaagtgagtatgtggagcaacctgaaccctcataagctggtggggatgtaaaatggtgaagtcgctttaggaaacaacctggcaggccgggcgtggaggctcatgcctgtaatcccagcactttgggaggctgaggcgggcagatcacttgaggtcaggagttcaagagcagcctgggcaacatggtgaaaccccatctgtactaaaaatacaaaaattagctgagcatggtggtgcacgcctgtaatcccagctacttgggaggctgaggcaggagaatcgcttgaacctggcaggtgaaggttgcagtgagccaagatcgcacgactgcactccagcctgggtgacagagtgagactctatctcaaaaaaaaaaaacaaaaaaaaccctggcagttcctcaaaaggttaaacatagagttaacgtatgacccagcaattccactcctaggtgtatatccaagagcaataaaaacatacaaacacgtatataaaaatgttcacagaggcaatattcataatagcccaaagtggaaacaacacacgttcatcaactgatgaatggacaaatgaaatgtggtctatccagacaatggactatcaattatttgtcaataaaaggaaatgaagtactaatacctgctacaacatggatgaaagttgaaaacagtatgctggctgggtgcggtggctcacgcctgtaaccccggcactttgggaggccgaggcaggcaagttgcttgagcccagaagttcaagaccagcctgaataacatggcaagaccctgtctctacaaaaaaacattaaaaaatcagccaggcacggtggcatgtacctgcagtctcagcttcccaggaggctgaggtgggaggatcacctgaacccaggaggtagaggctgcagggagccgtgattgcaccactactctccaacctgggctaagtgaaagaagccagtcactaaaggcctgtattgtatgattccatttatatgatatgtccagaactagcaaatctatagaaggcaaaagtagattactggttgccaggggctgggaaggttggaggatggcagctgtggtgcagggtttctttaggtggtgatggaaatgttttagaattcattgtggtgatatttgcacaactctgaatatactaaaatactggttttttctttttttttgagactgagtcttgctctgttgcccaggctgaagttcagtggcgtgatctcggctcactgcaagctccgcctcccaagttcaagagattctcctgcctcagcctcccaagtagctgggattacaggcgtgcaccaccatgcttagctaatttttgtatttttagtacagatggggtttcaccatgttgcccaggctgctcttgaactcctgatctcaagtgatctgcccacctcagcctcctaaagtgctgggattacaggcatgagccaccacgcctggccactaaaatactgaatgtcttttatattcaatatatttaaaaacattgaactgtatactttacgtgggtaaattttttggtaggtgaatatatctcagtacagctattaaccctcccccccaccaaaaaaaaaactttaaaaactctcttttatatgctcagaattctcccatgggtgccaggaaataaaaaccaaaatccccaccatagcccacgaggcccccatgatgtgacagtccttacctcttctccctctcacctccccactccagctggcctccttgctgttttgccaacatgccaggcagagttttgcctcagggcctttgcactggctatttcctctgcccaggatattcttccccaagatattcataagtctcactcctccacctccttcaggtctctgttcaaatgtcatcttctcaattagaccattcttttttttttagacggagtcttgctctgtcacccaggctggagtgcaatggcgcgatctcggctcactgcaacctctgcatcccgggtacaagcgattttcctgcctcagcctcccgagtagctgggacaacaggcacatgccaccacgcctggctaacttttgtatttttagtagagacgaggtttcaccatgttggccagggtggtctcaaactcctgacctcaggtgatccacctgcctcggcctcccaaagtggtgggattacaggcatgagccaccatcttctcaattagaccattcttgatcactctacttaaaattacacactcccttggccaggcacactggcttatgcttgtaatcccaacacttcgggaggcttaggcaggaggatcacttgagactaggagttggagaccagcctgggcaacatggtgagaccctgcctctgccaaaaaaaataaaaattagccatgcatggtggtgtgtgccaagctgcttgggagactgaagcagaaggatccctttagcccaggaggtcaaggttgtagtgagccatggttatgccactgcactccagcctgggtgacaaagtgagaccctatctcaaaaaataataagtaaaattacaaactccccgcttcaccaccccacccaatcccctcatatctctggtcagtttttccctatagtcatcacctttaacaaactatagaatatatttattatggtaccaccaccaccacccccagcttccctccctgggacccattcctggtatatcctttttaagatcatggttccagcaaatagaccatgtagggcactgactaaggccatgaactctgaaaatagtgtgcctgaatttgaatcctggctttgccacctatgagcttcagatacatttttgtttgtttgtttgtttgtttgtttttgagatggagtctcactctgtcacccaggctggagttcagtggtgtgatcttggctcactacaaccttacaacctctgcctcccaagttcaagtgattctcctgcctcagcctcccaagtagctgggattacaggcgcccaccaccacacctggctaattcttttttttttttttttttttttttgagacggagtctcactctgtcgcccaggctggagtgcggtggcgcgatctcggctcactgcaagctccgcctcctgggttcacaccattctcctgcctcagtctcctgagtagctgggactacaggcgcccgccaccgcgcccggctaatttttgtatttttagtagagacagggtttcagtgtgttagccaggtggtctcgatctcctgacctcgtgatccgcccgcctcggcctcccaaagtgctgggattacaggcgtgagccactgcgcccagcctccacgcccggctaattttttaattattagtggagacagggtttcaccgtgttggccaggctggtctcgaactcctgacctggtgagacgtgactttcaccttccgccatgattgtgaggcccccccagccacgtggaactgtgagtctatgaaacctctttttctttaaaaattacccagtctcaggttatatctttatcagcagcatgaaaacagactaatacaggtggagaggattaaatgggtcaatatgtgtaaagtggtgagaatagagtccagcacgtcataagtgctcaaataagtgttagctgttattttttgtaagcactaaaaccttaaaagggagacccttaaatatccatccatatttacttcaaccattttggccactaagtgacctatgtagccctagacaaacaaatctcttctcctttctgacttcagttgccccttttatggaatgaagttggagtaattgttcccaaggacctgccaagcaatagcttttcctggaaaaacttttaaaaataacttttattcattattactctaagtgaaacataggtctatccctcaccctacccccaccatagaagctccgtagggcagggtttttttttcctgttttgtcccctgctctaaccccagtgcctggctgggcgctgaagatacaagtgaacacagcaggcctggtccctgctctttccgagctcaaagggaggtagatctacccatgcagattcaaaggtcaaagcagcaacacacaccccatccttctgactgtggattcaggtgggggctgggtcctagccctggatcccccttgctttgtgaccagggaaagtaatggctcttctctaagcctccatttacccacctgagaactgagtataattttacatacccaatagaaaaacaggacgagcacggtggttcacgcctgaaatcctaacacttttggtggccaaggtgcaaggattgcttgaggtcaagaattcaaggccagcctgggcaatatagtgagagttcatctctacaaaaaattggaaaattagccaggcgttgtggtgcatgcctgttagtcccggctgctcaggggggttgaggtgggaggattgctgaagcccaggagttcgaggctgcagtgagctataccactgcactccaggctgggtgacagatcaagaccctgtctcaaaaaaaaataataaaaaataagaaggaaggaaagaaggaaagaaggaaggaaggaaggaaaagagtaaaaaggcaattcacataagaggaaatgcaagagccaataagcacccaaaactatgtgttacctcaaggaaaagggaggaaacgtgctaattaaaacagaacacagtttctccccataagatttgcaaaatgaaaatgatcaatagcatctatcgtttggtgaaggggtagaaaacagacatctgaaaaactgctgttagaaatgtcagctgggggcagtgctaatggatggaagtgtggcagtgtccattaaaagttcttaaattggcatactattaatgaccaagcaactctatttctaggaatgggtcctataaaaatacacacagacatgcacaaagaggcaaatacaaggacattactgtagcaagattcataatagcaaaagaattggagagctgacaatagggttagattatgagaatccccataatggagtcttcttttttttttttttttttttttgagatggagtctcactctgtcacccaggctggagtgcagtgcagtgatcttggctcactacaacctacacctcccaggttcaagtgattctcctgcctcagcctcccgagtagctgggactataggcacacgccaccacacctggttaatttttgtatttttagtagagacagggttttgccatgttggccaggctggtctcgaactcctgacctcaggtggttcacctgccttggcctcccagagtgctgggattacaggtgtgagccacctcacctggccataatggagtcttatatgcacctatcaataataatatagtgataggaaaatgtgttacctaaatttagatgaaatgggccagacatggtggctcacatctgtaatcctaacactttgggaggccaaggcaggaggatcacttcagcctacgagttcaagaccagcctgggcaacataaggagatcccatctctacaaaaagtttaaaaatagctgggcagggtgacgtggacctgtggtcccagctactcaggaggctgaagtgggaggactgtttgagcctgagggttgatgctacagtgagtcatcatcacaccactgctctccaccctgggtaatagagcaagaccccatctcaaaaaacaaaagaaaaaataagtagatttagacgaaatggacaaattcttagatgaatagggcctagcaaaactgacacaagaaaaaatagaaaacctaaatagtactataactatcaaagaaattcaatccttaatttaaaccctcctcataaagaaatcttcaggcacagagatttcacacaaagaagtgataaacactgcatacatatagttcaatttatgtaaatatataatttcacacatatattacatatataactatatgtatattcatacatatatatttatatagttatttagattcatatatatatgcaaacacataaacatgggaggatgcacatcgaactgctgattatgatgaccgtcagagaggggatttaggggctgtctgtttcccatgctgttcccatttttgtgaaaccatatttttttgttttttgagacagggtcttgcttgtcatccacgctggcgtgcagtgacacaatcatggctcactgcagcctgggcctcccagactcacatgattctcccacctcagcctcctgagcagctgatagttcaggaatgacctaccacacccagctaatttttgtattttctgtagagatggggttttaccatgttgcccaagctggtcttgaactcctgggctcaagatatccccctacccctgcctcccaaagtgctgggattataggcatgagccatcacatcccgcctgaaatcgtatttataaccaaacataacccaatcaaaggttagattccttgatgtaaaatagccaatggtaggaagatgatgttgagattcaccctgggacctccctggaaactgccatatccacagcaaacagaagttgctcaataaatgttagtccaaaggaaaaagagcatttctcccatttaatcattcagtgagagtccaccacatatgttacactgtgcatttatttacaaagaggttagagaaacacacagaatctggcccccctttgcactggggagtcaccatcgtcataataaatacagtaattttaaaaaagaaaaaaaatactagattggaacagctgagggtcatcaggcttcccccattccctctcacagggagtgggggtcatgagatagaaaccatcttccttcccctcttctacctccgaatcctccataattgtccagggatcgaagtgaaagagtccttctttccaggtgttaccaacccctacttgaccctcaaaacccccaaatcagtgctccttcccttcccagggcactctgcagggaccacctgagtcagacacagagtctctgaccagggtgccaaggggatatcttaagggtccagggacatggagggggcactttgtgaatgagagggggccatagctgggcaaggaaaggaggaatgagagggctcatcaggaatgagagggagagcggtggaggggaacaaacagactaggcttctaaactaaaacggggaaattcaaaccgaattaccccttttgcatacatggacacttactgtacagatgaggaaagtgacgcccagagaaggggaactgtcttgcccaagggcttccaagctagaagctgaactgggtcaaacagggctcctccccattcctctcggtggtggtgggggagccttttcaaccaagactgttaggagtggggagagtgaggggggtctttggaagcagagaaaacgatggtctttggaaggtagatgtggaagggtcagtggttgggagtgtggaggtgcagaggccatgaagggggagcccaagcaaatccccaaactcacactgtagtcatgaccttgagagaacccgaacggaaacgcagtatctttttcttgagcgcgtgggaagctttgattttcacgaagactttggcggggcctgcgggcgcccctgcacctgctccacccccagaggccgcggtggccgccaccagctgctgcggccacacgaggccaccgctgccgtctgagtcgctggaggcagagctgaaggcaggcgattctccctcgctggcgctcgattcgctctccccgtaacccccgccgacgcctcccgcaggcccccggcgtcccaggggccccaggcgcccagccgagcactcggagtcgctgcccgcgcagccgtaaagcagacgacgctggggagctgacggggacgggccggggccgggaacacgcgccgcaggggctcggggccgcacgcggcgcccatcggcagcgtcgatctccgcagtggagcgccagcgacggcaggaccctgcggcctgggccgccagcgtgggcgctgggccgcggcgtggccgtggaggccgaggctcttcccgctccgccgtggggtacttagggggccccgaagggaccgcggaggcgcggcccagcaggctggtctcagactgggagcgcgaggccttgcgggccctgggcgagccgcggcggcccgaagcctcggccatgcgtccacggcggccggcggcccggggacgctcccggggtggtgactgctccacgctgcggccgcgggtcagtggcggcggtttgcggcgggcggcgcggccagggaggcctcgggtggccgcctgcgcgcccgggatgtactgcgccttcaccaagcggccctcagccgggctgtcggggggtgagggggcggcgggcggcgcagcgggctcgggtgccgcctccgactcccacgacgacgcccaggcgcggctcaaggcggcagggctggtggggtggcccccgacgcgctccaacgagggctcccgcgcgggtcgcgcgctgccgggggacggagacgcgtcgggcggccgctggcgcacgctgttctggcgccgcgggccgccgtccgcgcccccgggactggtccggggctggcccgccccccggcggcggcgcctgcgcaggagcgccgagatgtagccgtccaggggccgccctgcgccccccgcgtcgggcgagtcggtgggagggcggccgcagggccgcgggctgcgcatcgccacggcgtgcagggggctgggcgtcagaaagggcccggcgcgggcccgccgctccgccgaggagcaggcctccgggccggcggacccccctgccgtcgggtagggcgctgagaaggaccgcggcaccgctgcccgcgcgcccaccacctccggagcgctgggactggcgtctcctagggaaggaaggccaaaaaaaaaaaaaaaagagagagtggaggggctctcaaagtcctttcccatttctcatccagcccggaaggggcgggttgcctccctcccttccatcctcatcgcagcaaaaaccctgctctcacaccttccttcttgtaaaattcataataaaatctttacagggtcctacaagaccctgcgtgacttgtcctgcctctgcctctgcctctccaactctcacaacatcttaccccctattttttttttttttttttttttgagacggagtctcgttctgtcgcccaggctggagtgcagtagcccgatctcggctcactgcaagctccgcctcccgggttcatgccattctcctcctgagtggctgggactacaggcgcccgccaccacgcccggctaatttttttgtatttttagtagagacggggtttcaccgtgttcgccaggatggtctcgatctcctgacctcgtgatcctcccgcctcggcctcccaaagtgctgggattacaggtgtgagccactgcgcctggccttttttttttaagacaggttcttgcttgctctgtcacccaggctggagtgcagtggcgcaatcatagctcactgcagtttccagctcctgggctcaagggatcctctcgccttatcttcctgaacggctgggactacaggaacgcatcaccatgccctgctgatttttttattttttgtagggatggggtctcactgtgttgcccagtctagtctccagctcccaggctcaaataatcctcccgcctcagcctcctaaagtgctgggattacaggcatgaaccactgagctgacccttctcctctacttataggactccagccacactggcctcctgaaagcaggcgccagtcacattctggcctcagagcctttctgcttcccattccagattccagatgcccggaatgctcttccttctggatatctgctaggtccactcccccacttagttcagggcacaactcaaatgttacagtctcagtgaagccctccccagccatattttctaaaattgcacttccctccccaaactcaaagggacacttctgagtccctttccccggcttatttcttgtcatagcacatggcattatttcgtaccctagatattttacttatttatcctggtttatttatttatctatttatttatttatttatttatttatttattttttagacgaagtctcgctctgtcacccaggctggagtgcagtggcatgatctcagctcactgcaatctctgccacccaggttcaagcgattctcctgcctcagcctcctgagtagctgggattacaggcacgcgccaccacgcccagctaatttttgtattttttgtagagacggggtttcaccatgttggtcaggctggtctggaactccagacctcgtgatctgcccgtctcggcctcccaaagtgctgggattacaggcatgagccaccgcgcctggccatttatcctgtattttatctattcctccaactaggctggcagtttcctgagggcagggatttgcctgttttgttcattactgttcattttgttcattgctcctgggatactgctaggtagcacatagtgggggctcaaaaacttacttgtatgaatgaatgacagcagttcctgtttaccagtgactgccatgcaccaagtccaatgccttagagcagaggctcactgaatattcaaaaatatccccttagggcaggcactgtttgtgtgtgtgtgtgtgtgtgtgtgtgtgtgtgtgtgtgtgtgtgtgtggttggtgttttatttttatctttttgaggcagagtcttgctctgtcacccaggctggagcgcagtgacaccatctcagctcactgcaacctctgcctcccaggttcaagcaatcctcctggctcagcctcccaagtagctgggatacaggcatgcaccacaatgcctggctattgaggcactgttattataccattttatatttatttatttattttttgagatggagtctcactctgtcaccctggctagagtgcagtggctccatcttggctcactgcaacctccacctccagggctcaagcaattctcctgtttcagtcttcagagtagatgggactacaggcacacatcaccacgcctagctaagttttgtatttttagtagagacaggattttaccatattggtcaggttggtctcgaactcctgatctcaggtgatccacctgctttggcctcccaaagtgttgggattacaggcatgagccactgtgcccagcctatttatttatttattttgagacagagtcttgctctgtcacccagactggagggcagtggcacaatcttggctcactgcaacctccacctcccaggttcaagcgatcctcccacctcagcctcccgagtagctggaattacaggtgttcgctaccacgcccaactaatttttgtatagacggggtttcactatgttggccaggctggtctcaatctcctggcctcaagtgatccgcccacctcccaaagtgctgggattacaggcgtgagccaccgcacccagccatatttcattttaacagatggaaaaacagagacccagaaataagagacctgctcataaccatgtgaaaaggaaatgtcacagctggaattggaatccaggcccgattcggaagtctgtgcccacaaccatcctcctactgtcctttccctggccccagggccccaccctcacccaccttacctagggacttgggcctctcactggcatagatgccccggggctcagagggacccaggcgaccataggagctggatccagagaagccactgtccccacagaaggttgagggtggtgaatctggacctcctgtagagctgggatcttcatagaagcctaaatttccaggagaagcagagagacttcagggggtttgggtgggaaaaccagagctggggaaaggaggagatggcgtggggagagacacagggggcctcagaaatagggatacggggaacatggaggcgtcccaggcaaaccctacccctccatccatgctcacccgagctacgcccgctctcctgttccaggcccccagactccaggctcaggtctcccagctgctgtcccaggtcccagacgagaccaggcagggcctcctgaaggcatagggagagaaggatggtcagaaggcccccagtcctctgccgactggtcccctattccacgagctcatgggcagagtttcactttgacaatgaggctctcgcttcaaaggataaaagcagtacctcagtcccaggaccccctcaagatctgtgtcccttcatccccattagaaagtccttctgacgttccaactccagtccttcatgctgcagccccatctcattccctcttaggtgtgatgaggcctcagaaaacccccatctcttgccctgtctttatcagttgctacccccaatctgtgctcagagcccctcaaccctgattagaatgtccctctttgagtctaacttcaggattgctgtaaggacagtttactgctaaaaggtggtgtccaggacccccagatcccttagtcataggtctgccttcttctccaagtttttctttttttatttttatttatttatttatttatttatttattttgagatagggtctcactctgtcgcctaggctggagggcagtggcgtgatcccagctcactgcagcctctacctcccgggatcaggcaattcacccacctcagcctcctgagtagctgggattacaggcgcccgccaccacgcccagataatttttgtgttttcagtagaggcagggtttcaccatgttgcccaggctgatcttgaactcctgacctcaggtgatccacctgcctcagcctcccaaagtgccgggattacaggcatgagccactgcgcccagcctctccccgtctttgaccttctttctcagatacgcccattgccccttatcaccaagagaaggtccttttgtgagtcttccttaagtccttcctgctgcagattgcctctttcccccatatgggtaaaataggctgaccacgactcataaacgtctttgctctcccttcagaaagaacctcccaagcctcctagacagtcctgtgagtctagccttactggtactgcagcagccatcccagcacgttcctttgccctagagaccacatcctccttctgcctttggtccactcccaccaggaagctccagtgagtctacctttcctcatcgccatgagaaatttcggggagtcaggccgggcgcagtggctcacgcctgtaatcccagcattttgggaggccgaggcgggcggatcacatgaggtcaggagttggaaccagcctggccaatatggtgaaaccttgtctcccttaaaaatacaaaaactagcggggcgtggtggtttgcgcctgtagtcccagctactagagaggctgaggcgggaggattgcttgagcccaggaggcagaggttgcagtgagccgagatcacaccattgcactccagcctaagcaacacagcaagactgacaaaaaaaaaaaaaaaggaaaaaagaaaaagaaatttccatgagtctaccctggatccttcttgctgcaggaaaagagcacttctcacggatggggtctccaagacattaggacttaatctcattttagaaaagagagggtcagagccagaaaaagtctcacatgggtctgagtgaggccgggtagcagcaggcagcctcgggctgacggttgaccctcagacaaaagcggcttgtctggaccgcaggagggagggaagtggggaggagggtttgggagggcaggcacccaaccctgcctatttagggcagaaagactggccggctccccggcagccacaacccccccgccccatcccagtctctccagggcccagcctctcccatccccctagaacagaagcccccatccgggcctgtttatttgaggaaggtcaacaaatccttccactctgggctcctgccctgggtatattgagatgctcacagtgaagtcatctttgagcggaactcaaaaaagcagctgaattgtgcagcatcaggaagtaactaaaaaaaaatctctcggacctaccatgtaccccatgtcacgtccgtcacaaatcactggcatgctcactcccctctagccacgcctggccttgccaccgtccctcgaacataccatgtatgcgcctacctcgggagaatgtttcccccacataccttccttgcttcattcagatctttggtgatctcttctctgacacctttccaaaatagctcccctgtcattgtgtaccccgttgccctgcttttcgggttttttctacatatcagtaatgacctcttgatttaaaattatacatcaggccaggctcggtggctcacgcctgtaatcccagcaccttgggaggccaaggcagggaggatcacttgaggtcaggagttcaagatcagcctggccaacatggtgaaaccccgtctctactagaaatacaaaaaatagccaggtgtggtggtgtgtgcctgtaatcccagctacccaagaggctgaagcaggagaattgcttgaaccagggaggcggaggttgcagtgagccgagatcacgccactgcactccagcctgggcgacagtaagatttcatctccaaaaacaactaaaataaaataaaagtatacatcaaggtatcatttgtttgttgaatctctcactagaatgtcagccctaggaacgcggagatttgtctgtttagctcacaggtgcacccccacccagtgcctagaacagtgcctggcacaaagtgggtgctcaggaaatatttaatgggctgggtgtggtggcttatgcctatcatcccagcactctggaagtgccaaggcgggaggatcgctggaggccgagagttcaagaccagcctaggcgacatagtgagacccagtctctctctctctctctctctctctatatatatatatatatatatacacaaacacacatatatatatacacacatatatatacacatatatacactatatatacacacatgtatatacacatatatgtatatatatgaaatttatttatttatttatttatttatttatttatttttgagatggaatctagctctaccgctcaggctggagtgcagtggtgcagcctccacctcccaggttcaagtgattttttttttttgcctcagcctcccaagcaggtgggatgacaagcatgtcccaccacacttggctaatttttgtgtttttagtagagacagggtttcatcatgttggccaggttggtctcgaactcctgactacaagtcatccgcccacctcagcctcccaaagtgctgggattgcatgcgtgagccactgtgcctggtcttttttattttatttttgagacaaggtctcactgtctcaccaggctggactgcagtggcacgatcacggctcactgcagccttcacctcctgggctcaggtgatcctaccacctcagcctcccaagtagctgggactacaggcacatgccaccacacccccgctaatctttgtatttttttgtagagacagggtctccctgtgttgcataggcttgtctcgaactcctgggcttgagcagtcctcccgcctcggtctcttaaagtgctgggattgcaggcatgagccattgcacccagctgtctattttttaaaaagaaatattagatgaaagaatgaatgtatacaatggaatactatacagctgttaaaacggaatgagtcaaatttctatatagaatcattaccaagatatagcattgagcagaaacagaaaagggcagaatatatatagtatgagtgactcagaattacctggagggcttgtgaaagcccaaatgactgagtcccattcccagagcttttgattacagcctgcagtcacgcccaagtagttgtatggctaacaagttccatgtcatgtggtgctgctggctaggaggccacactttgactggcatagtctctgggacctcacccaagaaactagaatttgtaaaaagcaaagctttgacaaaagctctacgttttttggtatgtaaacagtttctgttaggagatatgttggaagaggtctgggaggtgacactaaggtgacaatgatggtgacctcaggggataggttggatttaggggatccagggaggaatgaggggactggatggtggaaggaagtgtttaaggaggcgtgacttggcatcacattaagctctgctgctccccagctgtgtgaccttgggtgggtgactttacctctctgggcttcagtttccttatctataactgggcatcataggacaccatctcctggaggttattgtgaggattaaatgagtttctttttttttttttttttttttttttgagacggagtcttgctctgtcgcccaggctggagtgcagtggcacaatctcggctcactgcaagctccgcctcccgggttcacgccattctcctgcctcagcctcccgagtagctgggactacaggtgcccgccaccacgcccagctaattttttgtatttttagtagagacggggttccaccacgttagccaagatggtctcaatctcctgaccttgtgatctgcctgcctcggcctcccaaagtgctggaattacaggcgtgagccaccgcgcccggccaatgagtttcttttgacacataataaatgccagtttgtatgattacaggaaagctatgaatttcttataaggaaaatagaaaatgtttccattgtttaattaaaaataaatgtaggtgtcgggcgcagtggctcacgcctgtaatcccaacaactttgggagaccgaggcgggaggatcacttgaggccaggaattcaagaccagcctggccaacatggtgaaagcccatctctactaaaaatacaaaaattagccaggggtgatggtgcatgcctgtaattccagctactcgggaggctgaggcaggagaattgcttgaatccaggaggtggaggttgcagtgagccgagaatcacttgaacctaggaggtggaggttgcagtgagcagagattgtgccattgcactctggcctgggtgacagagcaagattctgtctcaatgaataaataaataaaggccaggtacagtagctcacacctgcaatcctagtgctttgagaggctgagacagaaggattgcttgagcccaggagttggagaccagcctgaacaacatagcaagacctcatatctttaaaaaaaaaaaaaaaattagccaaatgtggcggtgtgcacctgtagtcctagcttcttgggaggctgaggcaggaggattgcttgaggccaagttagaggctgcagtgagctatgatcgtgccactgcacttcagcctgagagactttgtctccaaaaataaatgaataaataaatatatcatttaaaaatacataaataaacgtgaaaggatagactttttggtaagttctgccaagtctaattccggttcttccattacaaggaagagcagaaattagggagacagacaggagatgcctcctcctctccagcacctagacgccccccaaaaatattccaagtctacacccctctatttgcaagtctggcctcattccttccagttgcaaaaggatgaatctttaaaagattagaaagtccttggcctgagtctggctctctgcctcctcacggtgcccctcatccttcctctgcaggcttaataagagtgtggttaggacccctggagacccctttgcccaaacttcccttaccttgtttctcccctcacgtgcccctcgttggtatccagtgcccatttatctctattaggaagtcattctgcaagtctaacttaagttattcttgatgaaaggaacctttttccttcttgagagcaagcaggacccagggagcccctgccctcacccaggattcctgcctctcttctctgccacacccctgatctttacctggtatccccatcattcctattagaaagtaatcaagtctggcttcagtctttcttgccttgaaggaagtgtattcctggcaggggctgggggtggggggataagtcataagacaagggttgggggatcagaagaagccctaatccactcttcagagggacccaggaacccccagcactagagaagtttatatttagcgcttctctgctcctcctcctccccccgcctgccaccgcctcctccctgatgctgggacaagctttgcctagagactggggggtggggggacaggcctctccactatcagctcgtgccgggaggacagagggctgagggggaggaggggacagagggaccgaggagagggagactgaagggcagagatggggaaggtgaagggtgaaaaggggagagaccgagggcagagggggagaggacacagctacccacagctaccccaacctcatgcctcgcattctccttgtcaggatggaaggcgccttccaagccgagccagcttggggtggggggagctagcgaaggcccccacaatccgtctctaactttgggagggggtggggcctcccacagctgtttctgtttccagaaaagaatgtgcaggggggtcccactcctgagagggggaggggccgggcgtgcagccccgggagcctggcttcagtcttcctccccactccccatctggggagggggcggtcgaggtcagcggcggggagagccccctccactgccacctcggctcaggtttcccgaaacgggaagctctggccacacacaggcttggggatggggatctgccgtggagccagggtgtgcgggctggggggaggggaagacagactgagcctgggacgtcgggcaagaagaagagagcgaggtgcagacaggcaggaagggaaggccaaggagacagatgcagagggacacagagatcacagagacagagagacaggatgaagaaagagaagcagacacagaaagtcacagggatgtggcaggacggagagagtgacagaacccaggacgagatcgggagactcaaggaatgacatagaaaggggagaggcatggggcgtcctcaagtcattccggagacctctgcccatcttccaccatgagaacacccagagtccagaagtctcccccaggcgctgcctcgacctgcctccccttgggtcaaggagagctggggccaggtaggaagcaggggaagtgtcaccaaagggtcaagatcccagtggggggtcctcagggactgtgagcttcctctcagcagtggtccctccctctggaggccctgagattcccctcctcccaccccgccccctccagagatctccaagcacaccaggacttagggaagatggagccctggtggcggggcccagagaagggcatgtttggagcctggctgtgtcaccttgggtgagtcgcttgctctctctgagcctcaatttgtttctctgttaaatggggactatcaccccgtttcccaagccgcaagaagacaacgcctgcaaagtacccggtctcgggtttgacacatacttggcgcccacaaggattttctttggggaaggggtgtaagagacagggcctgtgtttctcacgaggccccagtgggggcgatgcagttccccctcccccgatttgggggcggggaggccaggtccggcccgccgccggaactccggggtcgccagccccaccccctgtcctttctcactccctgcctacccgggtccccaacccccgcccggtgtctgagcatccaaccgagacagacagacacagacgggggtggagggacggacggacaggcagccccttaccagctgctcctccagggccgctgcggcccggcgcgccgccgccgcatcttcatcctcatcggcgtcctcctcgtcctcggcctcggcgccccccattccgggctgggccagccgcagcgcctgctgcacgcggtactcctgcctctcccggagccaatgtaactcgcagagcccggccaggctaccctccagccagccccgcagccggccccgctcagggctcaccgggaacgagaaggcccggatcatggctgcggccccccgccccagcccggccgggccccgcggccacccctctcccggtcccacctccccgccccagcagcctgcccgcccgcccgctggccgggctgtcaccgtctcatctgcataggcgcccgcccattgggccgcccacccgcgccttatctgcatggccacgcccccggcgaccgagcaacagccgcctattggcgaataagcttcctgacgaagactctcgggcgtgcaaccgcaccgcccaacacgacgcatgctcgcaactgcctactcactccgctcgccacgccccctccgtgcaactgcctcggggccctggccacgcccccccacgcgtcacaatgaaacaagcccgcccttgcttcaatgccattggtctgtgcctggccggtcctgcagcaggttccaccctcttgcgggcgagcgctggctaccattggactgtccggcgcgaggggaagggtgatctataaatagggaatgggtacacgtgacagtttggcagctgctcctacccctccaccccgcccaaccttcagcttctgaggctgcgcagggggagaaaagggttagggggtcgagccctgacttcgcctcctcttccaagaagccttcccagacactcagctgtaaaaccagacggacgtcctccgatgaaattgtttctacttagggccggcttcaccggcttggaatccacttagaagggtcttcgcgcttggttgaatgttctgcaatttctgtcttgaaatttttagtttttgagcaaggggccccttattttcactttgcactaggccaaatatgtagccggtcttgctgctaagagtctaagatcgattgcattccaaattctggaattataagaccctgggtggaagattctatgctttgaccagaagagagtctaagcagcttttgtctcccaggtgctaggaggatgtgtgctcatcattcttccattccaggggcctttgttctacgttctaaggggctttgttctcagccttctatgatgctctattctcaacgttctctggtcctaggagtctgagcctgacattcgtttccaaggcttcctgctgtctctccaggctccgcaagcagggctggggcaccctcaggcggccaatctgtatcactacgccgagcctgcctctaccaacttccaagacctagctctaatattcatactcatctctcagacagaccttggctccctaaaagccaaggcccagaagatcatacaagaaattccctcttttatgattccccgtgcacgaagtgaccttctggtggtgagatggagagaaattgatagtggcgatagacagcaaagtctccaggagccagacttcctcggggtgagtcacagatctgtcactttccagctgtgtgaccttggaaaacttacttaacctctctgtgccaccgtttcttcatctgatcacgggatcataatactggctgcctcatacagttgttctgaggattcaatgaaatgtattaggtacttggagcagtgtcttccatggattaagagccacagaagggtttgacaaataagtttaaaaactaatctagtaagtttccggggggaaatgtcttgaaatttattagagacaacctttattcagtcttcctcttgttcaaaatagacttagaaaattagtcgggtgtggtggtgcacacctgtagccccagctacttgggaggctgaggcgggaggatcacttgatttcctttttgacttcttgatgcttttattaatgatgatgccaaaagatttctggagaatcagccaggcgcagtggctcacgtctgtaatcccagtactttgggaggctgaggcgggcagatcacctgagttcaggagttcagatcagcctggccaacatggcgaaaccccatctgtactaaaaatacaaaaattagctgggcatgatggcacacaccgagactgtggcactgcactccagcctgggtaacagagggagactccgtctcaaaaaaagaaagaaagaaagaaattgagagagagagagagagaaagaaagaaagaaaaagaaagagagagagaaagaaagatagatgtctggagaatcaacaagcaacagttgcttccaaacatggcacacaaactggatatggtggcatgtacctgtagtgcgagctactcaggaggctgaggcaggaggatcacttgagcctgggaggctgaggctacagtgagccatgattgcaccattgcactccagcctgggtgacagagcaagacccaatctttaaaaaaaaaaaaaaaaattgtgattacagagactgagtcccatgcaggggctgttaatgaagttgcagaagctcatagaccttgatttatagatggtagggatgggaagaggttcccataaaaatcgagtggtgcgttgggagaggcctttgaggaaggcgtgtagggcacagtgctccatccaaaggctttggtggtgcgagtgaaggggatggggccctgggagtagtgatttgtgctgagaaaggggaacaaaactgacaatcctaattgcagttgtaagactgagtaaacacttttgcaaaagtaagccaggggcattgtggatcttgcaggctggaaggtagaatagggaggggagatgtgtcatttgggaagagacagaagttacagctggagaattgtgatctgagaagcatgtaatcaaagatcagtcaaagagaatgcaaatgaggccgggtggggtggctcatgcctgtaatcccagcactttgggacgcagaggcaggcagatcatttgaggtcaggagttcaagaccagcctggccaacatggcgaaaccccgtctctactaaaaatataaaaattagctgggtgtggtggtgcacgcctgtaatcccagctacttgggaggctgaggcaggagaatcgtttgaacctgggaggtggaggttgcactgagccgagatcacgccactgcactccaacctgggcaacagagggaggctctgtctctaaataaataaataaataaagagagagagaatgcaaatgaaaggcaaaagtcatatgatgagaagcaggcacgggaggaccagagtgggtattaaaatggggaatcctagccaggctctgtgacatgcacctgtagtaccagctacccagaagacagaagcaggaggattgtgtgagctcaggagttcaaggccaacctgggcaacatggtgagaccctgtctctaaaatagcgtgtgtgggagggaatcctggagtttctgattccaggagcaggctgtctcatgatgttgtctgcttaacccaaggttcttgggagagctgtctacaattgcagcctcgtctgcttccagggctcttgaaagagcctccctctgaggtctccaacgggagtggattcccattcagcacaggtcttatatctcttcatctctgagatatgaacccaaggcaggacagtctggtgtttgcaatagtgtagggtccatcccatctgagttcaaggttagtcttcctgcgatgtcttttccggaggactaaattccctgtttggaaattatgaagaggccgtgatggagtatttggagggaaggcagctcacacttgttagtgacaagcataagtgtacttagtccttgataatatctgagaatgtcgattgtaatagattagagtcctcaagggcccaataggagtagaatccttgtgagtctttgagtgattatttcataagaagattattgatatgtgctctggtaggaagagtaatggcccccccctaagatgtctacatctttatccctggaacctgtgaatatagcaccttttatggaaaaaggaactttttgtgattaagaatcttgagatagggagatttatcttggattatcctggtggacccagtatcatcacaagtttccttataagatggaggcaagaacgttagagtcagagaaatatgtaaatatagaagcagaggccgggccaggcacagtggctcacacctgtaatcccaaagctttgggaggccgagtgggggaggatcgcttgaggccaggactttgagaccagcctgggcaacacgtttctacaaaaaaaaaaaaaaaaaatcaaaaaattagccaggcatgatggcgcacatctgtggtcccagttatctaggaggaggatcgcttgaggccaccagtctgatgctgcagtgagctgtgattgtgccagtgcattccagcctggggcgacagggaaagaccctgtctcaaaaaataaaataaaataaatctgtgttgttttaagccaccacattcatggtgatttattctagcagtgtattcatttgctaaggtggccataacgaaacactacagacatagtttaaacgacagaaatttattttctcaccattctagaggccaagaagtccaagatcaaggcgtcggcagggctggtttcctccgaggcctctctccttggcttgcagatggtcaccttctcactgtgtccacacatggtttccagtatgtgtgcacacatccctgtgcctctctccttgtcttttttttttttttttttcaagacagaatcttgctctgtcacccagattggagtgcagtggcacgatctcggctcactgcaacctccgcctctcaggttacagtgattctcctgcctcagcctcccgagtagctgggattacaggcatgagccaactcacccagctaatttttgtatttttagtagagacgggatctcaccatgttggtcacgctggtctcaaacttctgacctcaagtgatctgcctgccttggcctcccaaagtgctggaattataggtgtgagccaccgcacccggcccaaaaaactttttaattagctgggcgtggtggtgcatgcctgaagtcctggctactggggaggctggggaggaagaatcacttgagcccaggaggttgaggctgcagtgagccatgattgcaccactgtgctccagcctgggcgacagagcaagactctgtctcaaaaaaaaaaaaaaaaaaaaaaaaaaggaaagaaaaagaaaagaaaaaggaaaataagctaatgcttgtggttatggggaagtcaagggacaacagtgggcaagggtaagttcaattcttcagttagtttggcaagtttaagtttgacgagactgaatcggcatgttcaatttgtcctgatgatcataggcaatagggctaaaggatttctgtgaaatgggagtacccactggttctctggattagcctgcttgatatggtatgggtaggctttgtgacccacccaaatctcattttgaactgcagtcctcaggtgtttaaggaaagacctggtgggaaatgattggctcatgggggctgttcttgtgacagtgagggagttctcacgagatctgatggttttataaatggtagtttttcctgcatttacacacacgcactgtcttgcctactgccatgcgagatgggcctcttcaccttccgccatgactgtaagtttccttaggcctccccagccatgtggaactgtcagtcaattaaacctctttcctttataaattacccagtctcggccaggcgcggtggctcaaacctgtaatcccagcactttgggaggccaaggtgggcagattacttgaggtcaggagttcaagaccagcctggccaacatggtgaaaccccatctctactaaaatccaaaaaatcagccgggcatggtggcacgcacctgtaatcccagctactcaggaggctgaagcaggagaatcgcttgaatccaggaggcggaggttgcagtgaactgagattgcaccactgcactccagcctgggtgagagaaaaagaccctgtctcaattattaactgtggtcactgtgcagtgcaatgggccgctaaaatgtattcctccagtctagctgaaactttgtacctttgatcaacatctttcctgggtcaggcacagtggctcatgcctgtaatcccagcactttgggaagccgaggtgggaggatcgtttgagcccgagagttcaagaccagcctaggcaacacagtgaaaccttgtctctacaaaaaaaaattaaaatcttccttttcctcatcccccctctggcgctgagtgtgctgtttgggctgacttgggttcagggaggcatggaaacactatgagcttgttgaaagtcagaagagagcctactgcttagaaatttcctgccgggtgtttaaggtgaagggccatccacaaagagggtgacacgagattgtcacatggaggctcttcaaggtcaggacaagaaagaataagaatctggggcccgggggcctgacgcagtggctcacgcctgtaatcccagcactttgggagacccaggtgggtggatcacaaggtcaggagatcgagaccatcctggctaacacggtgaaaccctgcctctactaaaaatacaaaaaattagccaggcatggtggtgggtgcctgtagtcccagctactcaggatgctgaggcaggagaatagcatgaacctaggaggcagaggttgcagtgagctgagatcacaccactgcactccagcctaggcaacagagcaagactccatctcaaaaaaaaaaaaaaaagaatctgggtccgggcctggtggctcatgcctgtaaatcccagcactttgggaggccaaggcacaaggatcgcttgaggccaggagttgggaaccagcctgggccacatagtgagaccctatctccaaaaaatttaaaaacttagccaggtatagtggtgcatgcctgtagttccagctagtagggaggctgaagcgagaggattgtttgagcctgggagtttgaggctgcagtgagctatgatcgtgctactacactccagcctgagtgagagagcaagatcctgtctcaaaaaaaaaaaaaaaaaaaaaaaaagcatgttagggagctccaattccccaggcaatccttccttgcctcttcccagcttctggtggctcttggcaatctctaacattatttggcttgtggctgcatcattccaagctctgccttcatcctcacatgcttctccctgtgtcttacgcggccaccttctcataaagacaccactcggccaggcgcggtggctcacacctgtaatcccagcactttaggaggccgaggcgagcggatcacctgaggtcgggagtttgagaccagcctgaccaacatggagaaaaccccgtctctactaaaaatacaaaattagccgggcatggtggtgcatgcctgtaacccagccactcgggaggctgaggcaggagaatcgcttgaacccgggaggcagggtttgcggtgagccaagatcgcgccattgcgctccagcctgggcaacaagagcgaaactccatctcaaaaaacaacaaaaaaagacaccagtcatgttgcattaggggcccaccctactccagtatgacctccttttaactgattacatctgcaatgaacttatttccaagtagggtcatatcctgaggtactagggagacaaaattcaaccaatgaccagcccagaaaccactggagttgccttttagtcttggataaaacaaaaataataatggtataaatgcatgctgtgtggataaggttttgccttcaagggcaaggtcatgccctaaatcttgtacttatgaattacatagttataatttatcctagacacccttttttttttctgagacagggtcttgctcttttgcccaggtggagtgctgtgatgcaatctcggctcactgcggcctcaacctgtcaggctcaagcaatcctcccacctcagcctcctgagtagctgggactagaagcatgcatcaccacactcagctaatttttttattttttatttttgtagagatgggggtctccctatgttacccaggctaatctcgaactcctgggctcaagtgatcctcccaccttggcctcccaaagtgctgggattacagacatgagcctgtcctttatgagcaagggcttggggccgatttttatttgtttttcctacttcctgtataattgcagaaacttggggcacgtgtggagtgtgagtgagtgagctgctggaatgaactgaccagacaggacatcatctatgtatgggattagaatggaattacaggagaaaaccaaatccctcaaattagcattcaggatcggaaaaaaaagtaagtaggggtttcaacgaaccactgaggcatagcagtgtatgtatgtttactgttgactttcaaggggaaagggaaatggggctgtggatcatcaggtgtgtgaaagaaggcagagggcatgtgagtacagtcgagtgggtggtgttggccggtctagaatagaggccagtataatgtttggattggaaatagcaggaaccacagtgtgactattttgtttacagccttgaggtcttggacttgctggtatcctttatcgagactgttattgggattttgttttttttttttttgagacagagtctcactctgtcacccaggctggagtgcaatggcgcgatctcggctcactgcaacttctgcctctcgggttcaagcaattcttctaccttagcctcctgagtagctgggattacaggtacctgccgccatgcccggctaattttttaatttgtttttagtagagacggggtttcaccatgttggccaggccggtctacaactcctgatctcaggtgatctacccgcctcggcctcccaaattacaggtgttatcattaggattcttggcagacaggagtgttgtaggggatggaagtggatagtaggaggctctgaataatgggttgggggccctagtgtgcctctggtgtcagagcacattaaggcagcttcaagaagggcatgaaaagatctaattctattccacaacttggggtaattggttaaaaaaaaaaaaagggagccaggtgcagtggctcacacctgtaatctcaacactttgggagaccgaggtgggaggactgcttgaggccaggactttgagaccagcctgggcgacatagcaagaccttgtctctatttaaacaaaattttttttaattctaaaaagaaaggatctacttctaccttaagaggttcagcctcccagaggcaccctacatttgttgagttgggggctcaaagagaatcaggaatgcaagtcacagatcttggatatgtaggtctgagggagaggtggatgttttgggaagggggtggttggagtggtgggaaagttagtggactgagatgaacaagggcagaattagggactgggagacataagccctcttgtgaatatgaaatattatggctttggctgggcacggtggctcacacctgtaatcccaacactttgggaggccaaggcaggtggatcacttgaggtcaggagtttgagaccagcctgtccaacatggtgaaaccctgcctctactaaaaatacaaaaattagccggttgtgatggtgtgcacctgtgatcccagttgcttgggaggatgaagcaggagaatcgcttgaacctgggaggtagaagttgcagtgaggtgagatcgcatcactgcactccagcctgggtgacagagcgagactccatctcaaaaacaaacaaacaaaaaagaaatattattgttctacgttgatagaacatccctttctaaagggattattggagtaatttgaataagaaactgtgctgggtagtagagagcccaatgagcccaagagtggcttagacaggcataaaccatgtggctaattgtggtctcatcaccattattgctgtgtactgaggtagggaggggggactgagatatttatggcaaagcatgtggcccctgtgtctacaaaaaccctggcaggatgctcattaaggggattgatggtcatttccccctgaaggttaaggaatccttatagacacagaggagaaagttggctggaagtgagtcactgggagactgaatcttagactcaaattccttttgcatttcaaagctaaatagtgtcaagtccaatgtcccttttctttacagtatatacaagtgtctctatcaacattaggttttgaggttgagtgcagtggcccacacctgtaatcccagcacttttgagaggtggaggatcgttcaaccccaggagttcaagaccagcctcggcaacatagtgagaccccatctctataacaaataaaaaacatgcccgggcacggtggttcatgcctgtaatcccagcactttgggaggccgaggtgggcagatcacttgaggtcaggagttcgagaccagcctggccaacatggcaaaaccccttctctactaaaaatacaaaaattagctgggcgtggtggcatgtgcctgtagtcttagctacttgggaggctgaggtgggaagatcacttgagcccaggaggttgaggctgcagtgagctgtgatcatgccactgcactttggcctgggcaacagagcaagattccatctcaaaaaataataaaataataaaaaaattaaaaactacataaaaaacaaaaaattagcgaggtgtggtggctcatgcctgtagtcccagctactcaagaggctgagggggaggatggcttgaaccctgtagtttgaggctgcagtgagctacgatcataccactgcacagaagcctgggtgatagagcaagaccctgtctctaacaaacaaaattaggttttgtgattccagtggtcctgataggataaactttttgtctctaatgatttaagttatagggccctaagttttcattgtatggatttgatttttttttttttttttgagacagagtttcgctcttgttgcccaggctggagtgcagtggcacgatctcagctcaccgcaacctccgcctcccagattcaagcgattctcctgcctcaacctcccgagtagctgggattacaggcatgtgccaccatgcccggctaattttgtatttttagtagagacggggtttctccatgttgatcaggctggtctcaaactcctgacctcagatgatccacccacctcagcactcaaagtgctgagattacaggcgtgagccactgcgcccggccttgattttatctttcatggcatcctcatgatatacactatctcctggaattctataattgaggaatgtttttgaatcacgtctctcatttctggtctctggatattaactagtggccaagacagaagcagatcaggggtgatagtcttttccatacattttctagcctgggtctgtcacgggagatggattcatctctatgttgcctacacttctggaccttagactaaacagagggataggcactggggatggagtctaagagcctttccccaatagtcttagcaactatgcctcagaggtatactgctcctttggataccttcatttactgaggctcgtttagcattttcaaatcaaagagctgcattttggccaggcgcagtggctcatgcatgtaatcccagcactttgggaggcctaggcaggcagatcgcttgagcccaggagtttgagaccagcctgggcaacatggtaaaacctctgcaaaaaatccaaaaaattagctgggcatggtggcatgtgcctgtagttctagctactcaggaggctgaggtgggaggatcacttgagcccagaaggtcaaggctgcagtgagctgtgttcatgccactgcactccagcctgggaaacagagaccctgcctcaggaaaaaaaaaaaaagctgcagctctggaaccatcagatggacaaggtgatacaaatcaaattggaaaatcccagagtaagctcccagtattagcctaaattggctactaaattctttcctgttttcctgggttttttaaggctgtgttgcccaaactggactcgaactcctggactccagcgatcctcccacctcagccgcttaagtagctgggaatacagtcacccgccaccatgcccagctttcagataggtctttgcagcacgtaagtcagagcgttctgaaagtctgaagaaaacttgttcaggtccatgctcggatcgttcaccttcagctgtggaaggtggaggaccatgtgttagggtgttactggagaactggggaggtggagggctggagtcaaaggtagagagaggtggatacgtgttccctccagttcattccctctgccttcagtctttcaaggccaagatgaagcctaagaggtcacctctgattccccactctctctgacccctgagctcattctaggctgcccaagcctcccaaactcccccagtccagcccttcccgttctgggtcatcactgtccaggggcaggtatgtctctctactggcagggcagtccttggctgtctcagtcaccactgtgtccccagcatcacccagctcagtgacacaaaggaatgagtgaatatatacttctctatttcatagatagagaagtcatcacatcaacataaaataaaatactgaatgttacgtatcagttttctagtatggatcagacttgggctaactgcattttattatttgacttttgagacagggtctcactctcttgcccaggctagagtgcagtggtgtgtgatcttggctcactgcaatctctgcttcctgggctcaagcgatcctctagcctcaacctccaagtagctgggaccacaggtgcaagccaccacacttggctaatttttgaactttttgtagaaagggagtttcaccacgttggccaggctgctctcaaactcctgagatctaagggatctgcctgcctcggcctcccaaattgctgggattataggcatgagccaccacacccagcctgaattaatagttgtgattagtagtaacaccaccaccaaataaaaaatcagtcatcacaaaccatgagattactttttctccaagttctctaccctccagtcacattccttccatctctccccagtttccaactcctcctccattactcctccctctcccttctcatcttctctcctggcactcttcctgtatattttctaccccagctcgtcctccttccaagactcctctcccatcagtcctctctccccaccccttccatccttcctcttttcaggcagtcctccttccagatgaactccatgttggtacaacagagtaatgattcgagagtgccgtgtgctgagatcaaggccatggggccagagatgagtccgttttaattgctggggaaacagggaggggccttggaaatagctccccccaccccactccccacgtgtcccatccagtttgggcaggaagccactttccctagaacagttcattgctgggatcctgtgaagaaccgctgtggagggcagcagctggacgagggcacaggacctcagagaacactgatgcgctccgccagcccctgcatgtcgtggtcctgtggtggacaggccccaccgagatccctgtccgtgggcagcccagacccaggcagcggatgctctgctgcaaactgctcccagcgcgcgtcgtcactctcatgcgtgatgtatcgctctcccatcttcccctccagctctcggaggtccagccacgtctggtactcctgggcccgagagaactggggttagcttggggtctgcattggagcagtgcctggatatcctctggtttgccactgagagctgggtaccaatgaaggtgaagccataccctctgcaacccacccagccagtagacatttagctccaccccctcttcctgcacccagccaatgggaggcctagccacattccagacccaaggaaacctacatccttcacaacctgcctagccaataagcgatctactcccaccccttcctccaatccagccaatgggccagccctgccccctgcatcacctgtaaccaggggtggctgagagatttgtccacgctgtagcgtttgcgcatcttcacctgcagcaggttgttgatgaggtcaatggctgcacaggaaagagaaacaggtcaagccctacaggtcaagggtcactcctcctccaataggcaccccctagcctacctgcctgccatcaacaccttccttctgcaccagctcaggtggctcagaagcctcacctgtgccaatcactcacccacccatttcctcattacattacaaatttgtctcctcctgcccatgcatgttcacaccagctccctctcttcacctgttctctacttcaatttccccattcccctatgtcacctttttttttctttttgtcatatacaggtacatacaattacacctgtactattctttttatttttacttatttatttattgagacagagtctcgctctgtcgcccaggctggagtgcaatggcacgatcttggctcactgcaacctccgcctcccgggttcatgtgattctcctgcctcagcctcccaagtagctaggaatacaggtgtgtgtcaccatgtcctgctaactttttgtatttttagtagagatggggtttcaccatattggccaggctggtctctaactcctgacctcaagcaatccgcctgccttggcctcccaaattgttgggattacaggcatgagccactgcgcccggcctaaatggattttcaacctacaatacttccttttttttttttgagacagggtctcattgttacccaagctgaagtgcagtggcgtgatcaatgctcactgaagcctccacctccccagcttaattgattctcctgccttagcctcctgagcagccagctgggactacaagcacctgtcactatggccggctaatttttgtattttttgtagagatacattgcccaggctggtcttgaactcctgggctcaagcaatctgcctaccttggcctcccaaggtgctgggattatgggcttcagccactgcgcctgaccaacttatgatattttcaatttacaatgggcaatgggtttatcaggtttatctaaccccagtgcaaatcagggagcatctatgtcatcaggctgggcgcggtggctcatgcctgtaatcccaacactttgggaggccgaggcgggtggatcacccgaggtcaggagttcgagacaagcctggccaacacggaaaccccgtctctactaaaaatacaaaaaattagctgggcatggtagcgcatgcctgtagtcccagctactcaggaggctgaggcagaatcgcttgaactcaggaggcagaggttgcagtgagccaagatcgtgccactgcactccagcccgggtgacaaaagcgaaactccgtctcaaaacaaaacaaaacaaaacaaaatgtcatcagatggtagttagtcaccattgcctgcagaaggctcagagataggcctgttcattgtgaaaaagaggactagcgaatgtcaagcttcaagacaagccagcactcatccgaggctctctccttgatgggaagccatgaaggacaaggcttcactgtatgaacccatccgaggagaggcctggtgcacacaggcaccctgctcccgtcaacacccacaggattctgtgatcctcacacaggtgcaaccacacttaaattcacttgtgcacactcgatgcacttttactgagggacttctgagtgggtctcaaaagacaatgctggcggggtgtgatggcttatgcctgcaatcccagcactttgggaggctgaagcgggcaaataacttgaggtcaggagttcaagaccagcctggctaacatggcgaaaccctgtctctactaaaaatataaaacatgagccaggcatggtgctgtgtgcctgtaatcccagttactcgggaggctgaggcaggagaatcccttgaacccaagaggtggaggttgcagtgagccgagatcacgccactgcactccagcgtgggtgaaagagcgagaccccacctcaaaaaaaaaaaaaaagccagtgttgagcacccccaatattactccaggactcaagtcaatccacattctcactgcttagggcccatgctcttagaccaccaccaagaccttgtcttgtcctgcaccgagcaacctccgtgtcaccctgctccacctgctccatgaagccgcaccctccagagaggacccttcccctttccacccttcgcggaccactcaatgagctaccctgcacctgaccccttctgtccaagtcatcacagtattcccagagctggaacagtcaatgcctggcacatcgtgggcactcaacatgttgaatcaatggttacaaatacatgaatgtacttgttgaataaatggttataaataaatgaatgaatgatccccccccttcccatactccatctgtcttcctgagctccctggctccaacacaggtcccttgttctcctggcttctgacacaccccagtatcttagccctgcctctggccctctaaacatgccatcccacacccagcctcaaagctccaggccttaggacttaacttttccaagcagggaaagttacagacccattcccaagtaggttcaagtcaccaggcccggtgccacttcatcaggcccagccacaacaccaaagccccagaatgcagagtgcaatgtctgcctcagtcctggctcccttctcctccccactcccatccactcccagcttccaggactcagggtcagccctgttcctggacctcttcggaaaccctccacggccacgtccctagactggctcccttggtcactgaaccgaccccaggcttcaggcccatcttcacccaagtcacggccccagtacacagcaaagtagccatgcccttgtttctcaaccctacccaccggtgcctcctttttgcaaggctgacccttttggggtcgtaaacccaaaggctccaggtcccagccaatgccttgggaggctcagccccttctcctggtcaccgcagccctttggtaccctcaagtccagtccctttcctggtcccaccctagacaagccaagtctcactcagcccccctaaggttccaagtgtcctcagcgcttctggggcacttggtttccagcccaagtaacctagtctaggcctgagtcccagcccatcttttacaggacggctcctcctgtagccacatccctccagtaggcccgccccagcactgggctccacccccaaggtgccaggctgtttccgggtccacccccctctcatggctccgcccacttctccagccccaccccacaacccacccgcccatggggtaggcgggccccaggcacctccagctgagatgtggctccaggggctggccgggtacatgaaggcggcgttctggatctggtcattgatgtcctcatcctcgttgaaagggaaggtgccgctgaggctgacgtacatgatcacgcccactgaccacatgtccagcgagcggttgtagccctggttgagcagcacctcgggtgccaggtaggccggcgtgcccaccactgagcggcggaacgacttctcgccgatgatgcgagcaaagccaaagtcacacagcttcacctgcagagggcaagggatggaggctccaccaggtgatggagccgcacccaccccagcatccccaccacaccaccctccatggtattccagagaaagctggatgctggtttgaatccaggctccttggctcactagctgagcaaccctgggcaggtgacttcccccctctgtgcctcagtttccccatctataggaagaagagcagaagagcacctatctcagaggactgccatgatggttagtgaattaaaccatccaaagcccacaggacaatatttggcattcagttggtgcacaataaatgctagctgctgctatacctctgccacctccaatgggtcgctgtttcctcttttgaataatgcagattttttttaatagcctcaaaatatacatgattggggcgtggtggctcatgcctgcaatctcagcactttgggaggccaaggaagatggatcatttgaggtcaggagttcgagaccagcctggccaacacgatgaaaccccatctctactaaaaatacaaaaattagcacacgcctgcggtcccagctactcaggaggctgaggcaggagaatcgcctgaacctgggaggcagaggttgcagtgagccgagatcgcaccactgcattccagcctgggtgacacagcgagactccgtctcaaaaaacaaacaaaaaaaacatgaaacataatggagatcttaacagtccctaccttaaagggtgcttgtttagactgaaagagaaatgtatgcaacgtgttaggagcagtgtctagcacagaatgaccctcgatgatctcaggtcaaggacctaatttctccaggccttgattttgtcatctgtattggggggttgttgatagcagcctcctctcaggctttcctggggattaggtaggagtgggtgctgactgcggtagctggcagacagtatggtgtatgcctacctttccttcattgttttattttttttgagacggagtctcgctctgtcgcccaggctggagtgcagtagcgtgatcttggctcactgcaacctctgcctcccaggttcaagcaattctcctgcctcagcctcccgaatagctgggatcacagggacccgccaccatgcctggctaatttttgtatttttagtagagacgacatttcaccacatcagccaggctggtcccaaactcctgacctcaggtgttcctcctgcctcagcctcccaaagtgctgggattacaggcatgagacaccacacctggccccataccctcattgttaatggctgcagtctaaggtcatggacaggctttggagccagcaagacctgggttcaaggtcttgctctgctgcctacctctcagccttggttcccagctctgttcatgtactgtcctttccctgttcaaaacccttccttggctcactgttgcttgcaggatagagccccaaatccttgaagcctgaagcctctgtcacctttgaaaccagccacgcctcaacccctgacctgaatctcaatgtgacagccaccctttcctgaggtactctgccctttctacagatcttatagctctttctcttttccaagatctatactttcctatggatcttttttaaaatttttattttattattatttttttgagacgagtcttggtctgtcgtccaggctggagtgcagtggtgtgatctcggctcaccgcaacctccaccctcctgggttcaagcaattctcctgcttcagcctcctgagaacctgggattacaggttcccgccaccatgcccagctaatttttgtatttttagtagagacggggtttcgccatgttagccagactggtatccaactccagacctcaagtgatctgcccgcctcagcctcccaaagtgctgggattataggcatgagccgctgcgctcaaccagaaaacttttaaatatgtttggaacaacttgggcatgtcaatctatttccccaactgttatacacaccagattttgaagacatagtatgaaaaacaagcagaatgtttcattgagttttgtttcttttttaagagacagggtcttgctctgtcaccccagctggagtgcagtggcacaatcatagctcacttcagacttgaactcctggtctcaagccgtcttcccatcttggcctcccaaagtgcggggattataggcatgagccacctcccctggccttaataatttttatgttgactacatgttgaataaagtgctatatgttgggataaactatatatatatatatatatatatttttttttttttttttgagacagagtctcgctctctcgctctgtcacccaggctggagtgcagtggcgtgatctcggctaactgcaagctccgcctcccgggttcatgccattctcctaactcagcctcccaagtagctgggactacaggcgcacaccaccacgccccgctaatttttttttgtatttttagtagagaaggggtttcaccgtgttagccaggatggtctcgatctcctgacctcgtgaactgcccgcctcggcctcccaaagtgctgggattacaggcgtgagccaccgcacccagtcttttttttttttttttaagagacagctctcactctgttattcaggctggagtgcagtggcacaatcatagctcactgcagccaccaactcctgggctcaagcaatcctcccatctcagcctcctaagcagctaggactataggcgcacgccaccattcccggctattttttttttcattttttgtatagatgaggtctcgctatgttgcccaggctggtctcaaactcttgggctcaaatgatcctcctgcctcagcctctcaaaatgctgattacaggcaagagccactgtgcctcgcccccacatcttgattagtataatccccttccccacccccaccccggccatcagtgttgcctggatttccccaaatcaggaggggacataactgacctgaggaaatgggtctgctgatgccagcaacacgttttctggtttcaagtcacagtggacaatgttcttgaagtgaaggtgtctcaaagccaccaggatctgaggggagcagatgggcccagtaagaaaggtagataggtactcagccaaatcccaacctcagcagccagccctccaaacccatccatacttttttttttttttttttgagacagagtctcgctctgtagcccaggctggaagtgcagtggcatgatctcagctcactgcaacccctacctcctgggttcaagtgattctcctgcctcagcctcccaagtagctgggactacaggcgtgcaccaccatgcccagctaatttttttttttctttttgaggcggagtctcactctgtcgcctgggctggagtgcagtggcacgatctcggctcactgcaacctctacctccagggctcaagtgagtctcctgcctcagcctcccgagtagctgggattacaggcgctggccactatgcccagctaattttttctatttttagtagagatggggtttcaccatgttggccaggctggtctcaaactcctgacctcgtgatttccccacctcggcctcccaaagtgctgggattacaggcgtgagccaccgggcccagacttgctctgataattttttcttttatttttagtagagacagggtttcaccatgttgaccaggctggtctcaaactcctggactcaagtgatccacccaccttggcctcccaaaatgctgggattacaggcgtgagtgagccactgcgcctggccccatccatgccttcctacacacccctgcagacaccccagccagggaaacaggaggcactggagcaccaaagaatctcagaatcatagaaccatttacatctgagagataagagttaaatgtaaactagaaagtctgggctagatgagtggggctgtgaagatcccaagatcttctagcatgtggtaaactcctgaatgctactgacagagcaggcatttccaagatccaactatgtgattctattttttttttttttttttttttgagacagagtcttgctctgtcactcaggccagagcacagaggcgggatcacagctcactgcacctcgacctcccaggctaaatccatcctcccacctcaacctccctagtaactgggattataggcacacaccatcacacctgactaatttttgtatttgtagagacagtgtctcaccatgttgcccaggctggtctcaaactcctgcactcaagtgatccacccacctcagcctcccaaagtgcttggataacaggcgtgagccaccccacctcacccattttttttttgaagagatggagtctccctctgtcacccaggctgaagtgcagtatcattctacagcctcaaactcctggggttaagtgatcctccagcctcagtctcccaaatagctaggactacaggcatgtgccaccaccaccatgtcgggctttgattccttttttttttttttttttgagaaggcctcctgattctcctgcctcagcctcctgagcagctgggattacaggcacacaccaccatgcccggctaatttttgtatttttagtagagacggggtttcatcatgttggtcaggctggtcttgaactcctgacctcgtgatccaccaaccttggcctcccaaagtgctgggattataggcgtgagccactgtgcccagcctgatttcatttttaaaaaaaatatttttcatccttacaaaaaactttggctgggcatggtgactcatgcctgtaatctcagcactttggaaggctgaggcaggtggatcacctgaggtcaggagttagacaccatcctggccaacatagcaaaaccctgcctctattaaaaatacaaaaattaggcgtggtggtgggcgcctgtagtcccagctactcgggaggctgaggcaggaaaatcgcttgaactggagaggtggaggttgcagtgagtcgacatcgcgccattgcactccagcctgggcgacagagtgagatgccatctcagaaaaaaaaagagtaccaaccttacaggttgctataaggtttaaagcatatctaaagatgcatgtaaaacgcttaggatagctaaccactgtatgttagctgttactgttgttgttattagttattatttttgtgatggcttgttggtaaatatatttgtttgtgtctcttaaataaagcttctcctgctgtatctgttcctatgataaggtgagctgattaaaaaaaaaattaccatttgtaaccattcatctgtgagaatcatatttcttgattctctgtaactcaaaatgccaagtacaccagaagcaattgtacaactgcaattattatctgtctcggagtttaaatacttgtgtatctgtctcagagtttaaatacttgtgtttattctgattgttttcttttttaaaaaaatctttttgtagagatggcatctcgctatgttgcccaggctggtcttaaactcctggcctcaaatgatcttcccacctcagctacccaaaccttgagataataggcacgacccaccatgcctgaccaacctcctcattctacagactgggagaccaagctggaaagatgcatgtgttgtatatgtcatctccagattgtttttttgagatggagtctcactctgttgcccacgctggagtgcaacggcatgacctcgactcaccacaaattccacctcccaggttcaagcaattcttgtgcctcagcctccccagtagctgggattacaggtgaatgccaccacacctggctaatttttgtattattagtaaagatgggatttcaccatgttggccaggctggtctcaaaactcctgacctcaggtgatccatctgccttggcctcccaaagttctaggatgacaggcgtgagccacctcgccccgcccatttccagattttgtcagttgattttctcccagttcatgtgaacaaagagggcaggttaggccgggcacggtggcttacgcctgtaatcccagcactttgggaggctgaggcgggcagatcacgagatcaaaagttcaagaccagcctgatcgacatggtgaaaccccatctctactaaaaatacaaaaatcagccaggaatggtggcgtgtgcctgtgttcccagctactcaggaggctgaggcaggagaatcatttgaacctgggaggcagaggttgcagtgagctgagatagcgccactgcactccagcctgggcaacagagcgagactccatctcaaaaaaaaaaaacattggccggatatggtggctcacgcctgtaatcccagcattttgggaggctgaggcgggtggatcacgaggtcagaagttcaagactagcctggccaacatagtgaaaccccgtctctactaaaaatacaaaaattagcccggtgtactgggacgcacctgtagtcccagctactcaggaggctgaggtgggacaattgtttgaacctgggaggcagaggttgcagtgagctgagactgtactattgcactccagcctgggtgacagagtgagacttcgtctcaaaaaaaaaaaaaaaaaaagaaaagaaagagggcaggttggaagctagatagatccagactcaaatcttggctggaaagctacttggctgtgacctcgagggagactgctatctccctgagcctcagtttcctcatctataaaatggggtttataacaatacctacctcctaggatggtggtgaggcctacataagctcaggaggtaaagggcttagcacagggcttaggtgtggggcaggcaagagcccagaaagcagaaatctgcagagagagagagagagagaaagaagagcgagcaggcaaaaagagaggaagagatgaaggccagaaagagaaaccccctcagctgctgaaagcagccacctgtgagaaccatgattcctttccacacctgaagtctggatgtggccgggcacgatggctcatgcctgtaatcccagcacttcaggaggctgaggcaggcagatgacttgaggtcaggagtttgagactggcctgggcaacatgatgaaaccccatctctactaaaattacaaaaattagccaggcatggtggcacacacctataatcccagctactcgggaggctgaggtaggagaatcacctgaacccagggggcagagggtgcagtgagccgagatcgtgtcactgcgctccagcctgggcaacaaagcgagactctgtctcaaaaatacataaataataaagtctggatgagggtgcatcagtgggtttctgtccccaccccataagccagcctgacaaacacaggcacactgcctgagaggataagggtgctgggccagggtaaagggaacacagcaacgatggctctgagacccacagagatgtctcagaagaaggcaaggcacccaccagaaggaagcctttctaggaaggatgtgaaacacagaaaccacacaaggggatatttaacatcgtaaaagttccactctatggccggctggacgcagtggctcatgcctgtaacccagaactttgggaggctgcagcaagaggaccacttaagcccaggagttcgagacccaacatggcaagaccctgtctctacaaaaacataaaaaaaaattagccaggtgtaatggctcatgcctgtggttccagctaactcaggagactgagatgggaggatcgctcgagcccaggagttcaagaccagcctgggcaacatggcgagaccttgtctctacaaaaacattaaaaaaaaaaaaaaaaaaaattagctggacgtggtggctcatgcctgtggttccagttaactcaggaggctgagataggagaattgcttcagcctaggagtttgaggctgcagtgaactatgattacaccactgcactccagcctgggtgacaaaatgagaccctgtctcaaaaaaaaaaataaaataggccaggcgcggtggctcacacctgtaatcccagcactttgggaggccgaggcgggtggatcacgaggtcaggagatcgagaccatcctggttaacacagtgagaccctgtctctactgaaaatacaaaaaattagccgggcgtggtggtgggcacctgtagtcccagctacttgggaggctgaggtaggagaatggtgtgaacctgggaggcggagcttgcagtgagccgagatggtgccactgcactccagcctgggcaatagagcaagactccgtctcaaaaaaaaataaaaaataaaataaataaaaccctatggtaaataaaaactaaatataaaataaagaggcaaacactgggataaaaccattgaacaatataagtgataagaatctaatgtgcacctccaccaaaaaaaaagaaacgcagaacagaggccgggcacagtggctcacacctgtaatcccagaactttgcgaggctgaggccgagtcaggaggatcacttgagcccaggagttgaagaccagcctgggcaacatagcaagtctttataaaaatgtctttataaaaattagctgggtgtgatggctgatgcctgttgtctcagctactcaggaggctgaggcaggagaattgcttgaacccgggaggtcaaggctgcagtgagccatgattgtaccactgcactccagctcgggtgacagagcgagaccctgtctcaaaaaaacaaacaaaaagcacaggcacacaaggaaaatctgtttgaatgtaacacaaatgagtttgacatcactagttaaaagcaaagatcctaggttcaaatcccaccagctatgtgaccctggacaagatatttgatgtctctgaccctcagtttcttcaaccataaaaggggattgataataatagcacctactgcacaggttactatgaagattaaatgagtttgaagagtgcttggcacatagtaagtgctcaataaatgttagtgaccacattatttatcatcaccattatcagcctcccttgtcctagccctgctcacctgagctatcactgtctaagaatggggctgtattggtcatccctgtgtcctcaacactgaccagcaagggaccaagcacagagcagggactagggagtgtttgttgaccaactgaatgaatgaatgagagaaaaagggctgcttgcccgttttttctattgtttggttttgagacacggtctcgctctgtcacccaggctggagtgcagtggcacggtcatagctcactgcagcctcaaccacctaggttcaagagagcctctccactcccttcctcccaagcagctaggactacagacatgtgctaccaggcaccacatccagctaggttttctatttttttttttactttttgtagaggtgggatctcactatgtcgcctaggctggtctccaactcctggcttcaagcgatcctcttgccttggcctcccaaagcgctgggattacgggcatgagccagcctgtttttgagatgggctcttgctatgttgcccaggctggctcaaactcctgggcttaagcaatcctctggccttagcttcctgagtagctgggattacaggtgtaccccaccatgcctgactccccttttttctagatgagtcaagtcaggtccagggagcctgactgatcatttattttttataataaaaatagctatcattaccgctagtctatttttttctattattatgattactctttattattattattattattatttttttttttgagacgaagtttcactcttgtcccccaggctggagtacaatggcacgatctcagctcactgtaacctctgcctcctgggctcaagggattctcctgcctcagcctcccaagtagctatgattacaggtgcctgccaccatgctcagctaatttttgtatttttagtagagacagggtttcaccatgttggccaggctggtctcaaactcctgacctcaggtgatccacccgccttggcctcccaaagtgttgggattacaggcgtgagccaccgcgcctggcatactctttatttttaattgttattgtcactattatttttcttttttctttctttctttttagaggcggggtctcgctatgttgcccaggctggagtgcaatgcctcttcacagatgtgatcccactactgatcagtaagagagctttgacctgctccatttccaacctgggctgctttgcaacctggtggtcccccactcctgggaggtcaccacatggatgccaaacttaatgaggacacctgatcagcacagaactcctgggatcaagtgatcctcctgcctcagcctcctgagtagctgagaccacagacacgtgctaccatgcccggcttattttttctattatggttattattacttctgtacgattatggttccttttttttttttttttttttcttgagatggagtcttgctctgtcgcccaggctggagtgcagtggcgcgatctcggctcactgcaagctccatctcccaggttcacaccattctcctgcctcagcctcccgagtagctgggactacaggcgcctgccaccatgcccggctaattttttgtatttctagtagagacagggtttcaccatgttagccaggatggtttcgatctcctgacctcgtgggcctcccaaagtgctgggattacgggtgtgagccactgcgcccagcctgatgatggtttctgttatctgctattgtgactcccccaagtgtctgcttgaccccctaggcatacagggcctctccaagctgacacctgatggggaggggcgggtggcagcgggcagggcagacgcacctgggtgatgaggaacttggtgaggcgctcaggcagccggcccttctcactggacaggatcatctccaacatgtccccatgcagcttctccatcaccacaaacactttctcaggcgtctcgaacatgcactccaggttcacgatcccgggatgccgcaggctctgcagggtggggagcggggtcagggcccaggtaacccacaaactcagaccccaacgggtcaggtataggagcaggaggatgacaaacaaggagaaggatgtccctggggtattggcacttggagagggaagggggcttcccacaggccaagacagaacaggcccacctccaccccacctgccaggtgcccagaaggatcttttttttctttctatttaaatatagagatggggtttcgccatgttggccaggctggtctcaaacttctggcctcaagtgatcctcccacctcagcctcccaaagtgctgggattacaggcgtgagccaccatgcccggcccagaaggatctttacatcctgaaattctggtggaggcccagggttgcaggagggaggagggggagcttggagaaatggggagagctctgcacatctgtatcttttaaatccataccccctctcacattctccagtcctatcctggcctaacccctctctcccacccagatccccactcagcctcctggctacaatcacttccctttccacccaccctccagatggcagcctgcgggattttcctaacgtacacacctgatcctgcccctcccttgctcaaaagccttctgtggctctccagtaccctcaggagaaagtccaaagggtctggctccgccctcctccctggcctcatctcccagtacctcctttctagaaaacctcatgctccctctcaccaggtctttgtacaggctggtccctctgctaagaacaccttctccccttcagtctcaacatgcacatgccctcccccaggaagccttccctgaccacccctacactgggtcagctggcccatgaaaggaagaagcagaaagggaaggcggcctggtggttacctgcagaatggccacttcattccggagctggctctcctgcttggtagggaagcgcagtttgtcaatgaccttaactgccacgtcccggcctgtcttccggtgttttcctgcacagggagtagaagagatgggggatgagagagcaagaccacccagtcctggcaggagtatctccacctctgccaacctctgccccccaccatggagacagccagagttgggcagagttggaaggccccaggagatacgtgaaaaggccacctgaggtgcaccttgggagtaaaggcagaaagaaggaaagcaaaaaacaaacaaaaagctccgaagaagggaatgtataacatgggaaactggatttataaccagtcggaatctagcatctagttttgtgtgacccgtaagagtcctggggacaggggagagacaccagcaccaggggaggcagactgaccatattatacagagaaggaaactgagtcttagagtttagagtgtagaagttaccctccctgtcctattgaactctaggatctagctctgtggcaaatcaaagtgtaaaatttaccacccgccccatacaatcagaatctaggatttagcctgtggccaatcagaatgcagaatctaccctccaatccaatcagaatctaggatctagacctgtggccaatcagaatgcagaatctaccctcctattcaatcagaatctaggatctagctctgtggccagagtgcagaatctaccctcttttccaatcagaatctacgaactagttctgtggccaatatgaatgcagaatctactctatccaatcagaatctaggttctagctctgtggtcaatcagagtgcagaatctaccttccctatccaatcaaaatctacctctgtgaccaatcagagtgccgaatttacccttcctattaataacaggaggaatgtccattggtttttcccaatgagaaaaggagaacctgcaatcagtccacccaggatctagctaagccaatcaacatgggaggtgagcatgtgaccaatcagaaaggaagggttggagccagaaagaaagggctggagccacagcagcttcccccagcccggggctccctctgggttagctctgaagtgtcctcacctccatagaccactccaaactgccctgagcccagcacttcgtcagggaagatctggtagacagtggcaatgtcctacagggtgaagacagggcaggtcaggggtgcaaatggaaatggggaagggggagtcaaggagacgagagagctgaggagggtttgtgggaggggagggcatcaggtgggggcaggagtctcaccacattctcttggatctgactgttggacacagagatgctcagagaagcttgtcctagggagaggggagagacagaggtgaggggactccaggctcaggattatctccacccatacctgcaaaagcagacttgggagtcaggccacccagatttgaatccaatgttcgatacaatgtgcaacttcaggctggtgacttgtccactacgaacctcagtttcctcatctagaaaatgggaataataaaaggacctccctcatagagccaccaggaggagtaaatgagatgtgctgagtggctaaaggagtgatgttacagatgattttgctgagcattttaccccaggatctcagcaccaggggaggcagactgaccccattgtacagagaaggaaactgagtcttggagggaaagcccagactgactcctgcatcttcccttgaacttttccccctacaaacccaaccagagccagacatttctaaagtccgatccttctgccatttgaatgtctctctcttccaccagtctaggcccctgctcgccccccaactctgggtcctcaccccacagccccttccctggtctccttgccccaatcctgccccttcctactcacctcccacagagaaaccagagggatcttactgaggcacaagactgaccctgtccctcctctgctcacaactctgccatggctccccagtgccctcaggaagaagcctgagccccttaaatggcctaaaagccatggcctagaccctcatctacctctgacttctacccccaacatgctattcctgacacactggcctccttgctcggcctcaaatacagcaaactctcttctgccttctggtctctgcatatgctgtttcccctgccaggaatactctttccttcatcctagacttagctaaatcctcctcatcctcaagtgtaagctcaaatgtcactcctaggaccaagttggattactctcgcaaatgctctgcatcacactcgttgcttgtatgggttaatgatcaatgtctgtcacccacactggattataagctccagagggtgggaacctggtactctctcaacattttttgcctctgcctaaaatgacctcccattttctttcccacatctcaccctgcctcggcctccagatctcagttcagatgtcacctcctccaggaagcccccctatatacccagattgggtcaggtacccctctgggctcctctagctccctagcttccttgtcccaaccctgcccaccctggactgtcactctctgaagatgggtattctgccctactggactctgagccccatgagggcaggtcttgggctgtcctggccaccactgggtccccagcactgtcccgcacagaggaggcactcagtaagtgcatgaggacttatcagcacctgggacaaggctcatggaggggaagtgatatgcccagggccacatatcaggccaggagcttaacagagatttgttgtggatttttgttgttgttgttttttctgttttggagacagagtcttgctctgtcacccagactggagtgcagtgatgcaatcatgactcactactcccaggctcaagcaattctcctgcctcagccttccaagtacctggaactacaggtgtgcaccaccacacctggctaattgtttttattttttgtagagatggaatctcattatgttgcccaggctggtcttgaactcctggcctcaagtgatcctccctccttggcttcccaaagcgctgggattaacaggagtgattaacagagtttgaacccaggcctgctgagtccagaagctgcgttctcaaccccaccattgcccactttcctctttggcccttccattccccagaaccgtgccccacccatctagatctattctctcaaggacccgaggtgggaggacttactgtggggcgcgtggcctggggcgctgggtgcgtcctgaaggatgacgggcatcagggcctggcggatggctgtctcccagccccgggcggcctcagccccctgcccacttggcccacccggagtcccgccaggcatctcgcccacgaagtaggtggcattggcagtgacgatctcaaagcagtgtgggttggtgcccggcggcacaaggctgaagttctgggcggactccaccgtgaggatttctgacagcggaatttcctgcaggacgtggaaccagcacaggtgaggatgccaggcagaccttggaattctagtgcttacccagaaggatacacgggatccatgttgatagggatgggcctggtttgcacagtggtcagacaagttcccagtaattctaagcctgttctcactgttcttttataattactggcagaggccaggtgcggtggctcatgcctgtaatcccaacactttggaaggccgaggtgggcagctcacttgaggtcaggagttcgagaccagcctggccaacatggcaaaatcccgtctctactgaaaatacaaaaattagccaggcgtggtggtgtgcgcctgtaatcccagctaatcgggaggctgaggcaggaaaatcgcttgcacctgggaggcggtggttgtaatgagccaagatcgcaccactgcactccagcctgggcgacagagtgagattccgtctcaaaaataataataataatactaattactggcagaagtgatattgaagcagagaccagaaaggtaagaagcagccagttggcaaggagtaggggaacagcatgtgcaaaggccctaaggaaaggctatgctcaaaagccaagctgtatccccatcacatgggcggtgcctggacatagtaaaagcttgataaacatttgatggccggatgtggtggctcgtgcctgtactcccagcactttgggaggccgaggtgggcagatggcccaggagttcaagaccagcctgggcaacacagtgagaccccagctctacaaaaaatttaaaaattaggcatggtgccacaagcctgtaatcccagcactttgggaggccaaggcaggcagatcgctggagcccaggagtttgagaccagccagagcaacacaatgagacccccatctctacaaaaaataaaaaaactagccaggtgtggtggtgcgcacctgtaatcccagctactgtggaggtgggagaatcatttgagccagggaggcagaggttacagtgagccatgatcatgccactgcacctgggagacagggcaagagcctgtctcaaaataaataaatgggctgggcatggtggctcatgcctgtaatcccaacactttgggaggccaaggcaggcggatcacaaagtcaggagttcgagacccgcctgaccaacatggtgaaagcccatctctactaaaaatacaaaaattagccaggcgtggtggcacacctataatcctagctacttgggaggctgaggcagaagaatcacttgaaccccggaggcggaggttgcagtgagccaagatcgcgccactgcactccagcctgggtgacagagcgagactccgtctcaaaaataaacgtttgataataaatggaggaaatgaggccacacagggctttgcgggccacaaggaagagcctgggctttgtccaagggccctaggaagccactgaaggcttttgagcatcatccgcttgtgtgcggagggcagatggaatagaatgagatggagacagagaaccaggaaggaggctgaggggacccaggcgggacagaaggcacagggactatggggtgggaaacgtgtcaaaagaggaaggagggaggtaggagagaggaaagaatgaatgacttaggcagcccataaaaccaggtgatgacatggacacgtcgggggggcatggtgaggacagcattatattttattttattttatttttttgagatggagtcttgctctgttgcccaggcaggagtgcagtgacgcgatctcagctcactgcaacctccacctcccaggttcaagcaattctcctgcctcagcctcccaagtagctggggttataggcacccgccaccatgcccagctaatttttgtatttttagtacagacaaggtttcaccatattggccaggctggtttcgaactcatgatctcaagtgatccgcccacctcggcctctgaaagcgctgggattacaggcgtgagccaccacgcctggccaaggacagcattttagatggtgtggtctgagcaaaatgggaagatgataaggaaccagccatggaaagttcaaggaagacgctccagggcaggtaacagctggagtccaggttttattactctaagacaatgggagccactggggggtttgacggttttaatgaagactcccctggctgtgggggaaatgacagaggttgtgaggtcagaagcaaggaccctgcaaggagaaggctgaaaccatccaggtggaagacagtggctgggacacagtgtgggcatgggaggtggtgacgaatacgcacacaatgcaatacattaattataaagaaatagtgaggccgggtgcggtggctcatgcctgtaatcccagcactttgggaggccgaggggggcagatcatgaggtcaagagatcaagaccatcctgtccaacatggtgaaaccccgtctctactaaaaatacaaaaattagctgggtgtggtggcattcacctgtagtcctagggtgggaggctgaggcaggagaatcgcttgaacccgggaagcggaggttgcagtgagccgagatcgcgccactgcactccagctgggcgacagagtgagactctgtctcaaaaaataaataaataacaaaaaataaaggaatagtgagaacagccttagaattactgggagcttaatatataccacgccttaagccaattggtttagtggattggctctttgaattctcgcaccagccctgaggtgagtattagcatttgaggcattttgcaggtgagaagcgtgaggcactgagaagtaagggaacctgcccggagtccccctggctggaaagtggtggggccagaatcggatgggcagcacttgctgatgagctggaagcagggaggctgggggtgggcagagggtgtgatttgcaggatctgtctggagtaactgggggtaggaggaggtgtgggaaagtttgtgggcacagcgggaagtccgagggagctgaaagcccggaggcttaccttatagtatctgttggtcgtgttgttctggaagagcgtgatacacttgcagtccaggcgccaatagtgccgctttctctgcagagatgtttgaagagtcacgtgaaccgccagactttcctgcccagtccctatcccgtggagctgcttggggctccaggtgcctggagcaccacgtgcacgccgtaactctagcacctaccccacgccgtaaccccaccccaccacacgccctaaccccagccccgcccctagccttaaccctagcccagcccccacgccctaaccccagactcgcccccacttagccctcttcctccagccaagctcctcccctaactctagccccgcccctgaccttgccctgagccccgggtcttccctaactcctgcccgtagtcccacccttacagcccacacttctaattctagccccgcctccagcacggcccagcccactactggccccgctcgcgcctagctccagccccacccacctagccccgcctactcaagctgagccgcccctcttccagccttcgctccgccgtacccggccccgccccggccactcaccagcgtgtccttgttgctgtaatgaaccacccaaccctcccgcagcgtggtgctggatttccgcgtcgtgtgtcgcaccgattgcaccaccctcattagggggatgtaccccagggagctgcgaaggaagaggaaggggtgagaagtcacatgcagaaagtgaccatgctgcttgggaatgcagggggcatctctgggaaactagggagttggggactgtttttgtttgtttggtttgttttgacattttccccccaacacacacccgggagttgctttttgtttgtttttaagaggctcgctctgtcacccaggctggaatgcagtggtgcgatctcggctcactgcaacctctgcctcccgggttcaagcgattctcgtgcctcagcctcctgagtggccgggacaatcacggtgaccattaggtgcacgccaccacccctggctaatttttgtatttttagtagtgatgaggtttcaccatgttggccaggctggtctcgaactctttgcctcaactccttccctaactcctgcccctagtcccacccttagaatcccttcacgagatccatccgcctcggcctcccagagtgcttacaggtgtgagccaccacgctggcccagaaggagattcttgagagggcttctgtagtaggcctttctgaagtcaggctgcctagcaaattacctaacctcttcatgcctcagtttgtccacccaaaggggatgctatgaggaatggaaacctttctacggagcttagtacagtgcctggcatacagaggacctccagtaagtgctaattggtatttagtccagcaattgtggagccagctgtgtgacactgggtaagtgattcaacctctctgggcctcacctccctcatttgtgcagatgctgttagtacagtaaggaaggtctacagagattaagtggcctgctgggcatggtggctcatgcctgtaatcccaacactttgggaggcagaagtggggggatcacttgaggtcaggagtttgagatttgagagattaagtgacttgctcaactctggaaccaacaatctctggatccctgtgctagatcagaacctgggtggccttgatcacatctctttgcctgagactcagtttccccatctgtgaaatgggctgcctctccccacacccgccacccccaatccctcaaggtccaactcttgacagtgtatgacggtgttactaggcattcccaggaaagacgtgggagaaagggaacctgcggcttcaggctgcttgggttgggaggcaccgcaggaaacactctgtcgtcactgtgactggcttacccatcccctttctgtccaaccctcttcccctcgccctccctgctgcagctacatgggtctctttgctgtccctggaacacggtgcctccaccccagggcctttgcactcgctgttgcctctgcctggaagccttttcccccagagccccacaaggctccttccctcccctcccttcaactgccacttcctcagcgaggtctccttgaaggaccctaagatagcatgtcccccattctccatctcctcttgtttttatcaccattaccaatacccgatgctatggatgcatttattagctgtctccccactgaggcagtcagctccagaagggcagacttttacctcttttgttcatagctgtgtgcttgaacacagcaggtgctcattaaatattttccagtgcacctgtgagggtgcccccttacccctaccccaggtttatcaccccgtggggtaggtacctcatcgccccaggaggaaaccgtggcacacagggaagcgcctagcaagtgaagtggtagagctgggatctgggctgtcaccctccagcgcctgtgtgaactgtgctttctcaataaacattcacgccacacccagataggaagtgcctgatctgagccagtcctgtcctaggcacctgggagggcagaaaatatccttgccctcatgcacctgagctcacattccagtggagctgactaagtatgaactccgtgtatagtttaaaaatgtgtaggctgggggcacagtggcacacacctgtaatcccagaactttgggaggctgaggtgggaggattgcttgagcgcagaagttcaagaccaccctgggcaacatagcaagaccccctatcttaaaaaaaaaaaaaaaaaaaaaagaagaggaatataggtcaggcgcggtggctcatgcctgtaatcccagcactttgggaggccgaggcaggtggattacctgaggttgggagttcaagaccagcctgaccaacatggcaaaaccctgtctctactaaaaatacaaaaaaagtagctgggcctgggcgggtgcctgtagtcccagctacttgggaggctgaggcaggagaatcgcttgaacccaggagacagaggttgcaatgaactgaaattgcatcactgcactccagcctgggcaacaagagcgaaacgccgtctaaaattagccagggatagcagtgcatccctgtagtcccagatactcgggaggctgaggcaggaggatcacctgagcccaggagtttgaggttacagtgagccacaatcacaccactgcactccagtgggcaacaaagcaagaccctttgggaggctgaggcgggtggatcacttgagctcaggagtcaggagttcaagaccagcctgggcaacatagggtagaccctgtctctacagaaatacaaaaattagctgggtgtggtggacgagcctgtggtcccagctactcgagaggctaaggtggcaggatcgcttgagcccaggtggtcgaggctgcagtgagtcaagactgcaccactgcaccagcctgggcgacagaccgagaccctgtctcaaacaaaaaattatttaaaaaaaattgtagtgctttaaaaggtttgcctcaggaactgggaaaatttataaatatgaggtgatgtcagcccattgtagagaaaaagaaattgaggttcactgtgcaggagggtcttcccccagggtctcttggagggttctgtgtatacctctgggccttgcctccctcgccttcctcctcctcactggcgtggagcgcattctctgagtgggagccagggatgacaccggagtcctctgactcatccatgagggcgctcttgtcagcctcgctgaaatcggtggcctcctccatcggcacatctgtggggacggaggcatcagaggggtctccacccagtcctgccccttcccctttctccccagcatccccccagcctctcacctccattgataagggcctcccccaggcagtcattagggacgcgggtggcgcagcgtttgtgacagttaaacttgcagtctggtaggacagggaacaagggaacgggtgagaaggggaagagaggttacctggaaggcttgaaccttgaccctaagcctcaggctcaaaagagtctactcttgctgtctgggtaagaacactggctgctgctgccctggtcattttcccactttcagccacagttttcccaaccatcgggggggtcttgattaagtaggagggctagactcaaaatcccgacgactgctgggtgcagtggctcccgcctgtaatctcggtattttgggaggccggggagagcagatcatttgaggtcaggagttcgaaaccagcctgccctacatggtaaaacctcgtctctactaaaaatacaaaaattagctgggcgtgggactacaggcgcccactaccacgcccagctgatttttttgtgtttttagtagagacggggtttcgccatgttggtcaggctggtttcgcgctcctgacctcagatgatccacctgccttggcctcctaaaagtgctgggattacaggcgtgagccaccgcgcccgacttgtgtgtgtgtgtgtgtgtgtgtgttattggttctaatgtgctgtgactccagactctgaacaccctagggctgggttcctcaacccgtgacactaacacagtgcccaggataattccttgttttagggcacttgctctgtgtattgtaggatgtttagctgcatctctgacttctacctactggatgccagtagcactatcccagcgtaccaaacaaaaccatctccaacccttgccaaacatcccctaggagcaaaacggcccctggtcgagaaccattgctgtagagttcagtgtttccacggttctagggacactatacatcgaagattctagagtttactaaaaacctattttatgaaggttctatgattctgttttttgttttttttttttttttttaagaaacagtctggctgtcacccagactagagtgtgcaatggcaccatctcggctcactgcaacctctgcctcccaggctcaagcgatcttcccacctcagcctcctgagtagctgaaactacaggcacgcactaccatgcctggctaatttttcgtattttttgtagagatggggtctttccatgttgtacaagctggtcttgaactcctgggctcaagcaatccacccacctaagcctcccaaagtgctgggattacaggtgtgagctactgcccctgacctgattccgtatttctaaggcttcagagtttgatgtccaagtttctagaactctagacatctatgagtcaacacttctaagactctttaatgtccaagattttagggtgttatatatctaaactctaaaatttgacagttctagggttctacaattctaggcttctctacctccagaatctgcagattccaaggttctaggattctatacatacaagattctagaatttgatgtttctatgcttctttagctctaggcttctaagattctagaatttgattgttccagtaaattcttgaattggatgtttctaagtttatgtggatctaggcttctgaggttctagaatttttttttttctttttttgagacaagttcttgctctgtcacccaggctggaatgcagtggcacaatcatggctcactgcagcctcaacctcctgggctcaagcaatcctccctcctcagagtcccaagtagctggaaccacagatgcatgctgccatgcctggctaatttttaattttttttgtagagacagggtttcaccatgttgcccaggctggtcttaaactcctaggctcaagtgatccacctaccttggcctcccaaagtgctgagattacatgcatgagccaccacacctggctggattctagaatttgattgttcaaagttctgggagtctagaatttccaggattctaggttacgatggtttcaagcttatatgattctagacgtctaagactctcaaatttgatgtgcctatgtttctattaccctcaaatcccatggttccaaaattctcatgctctgagagtctataacttgggagatctaagatgtgtaatctaaagttctgttgttattttagctgaattctatcattcggaattcttgaatgctatggttctgattctagaattctcaggttctacagttttagaattccatgctaagcacgttatgaatctaggattccaaggttctaaagactgaggttcagctgggcgcggtggctcacacctgtaatcccagcactttgggaggccgaggtaggaggattgcttgagcccaggagttcaagaccagcctgaacaatatagtgataccttctctctacaaatgatttaaaaattagctgggtgtggccaggcgcggtggctcacgcctgtaatcccggcattttgggaggtcgaggcaggtggatcacaaggtcaggagatcgagaccatcctagctaacatggtgaaaccccgtctctactaaaaatacaaaaaaattagccaggcatggtggcgggcgcctgtagtcccagctactcaggaggctgaggcaggagaatgtcctgatcccaggaggcagagtttgcagtgagccgagatcacaccactgcactccagcctgggcgacagagtgagactccgtctcaaaaaaaaaaaaaagaaaagaaaattagctgggtgtggtggcaccacctgtagtcctagctacttgggaggctgaggcaggaggatcacttgaacccaggaggttgaagctgcagtgagccgtgattgcgccactgcactccagcctgggtgatagagtgacaccctgtctccaaaaaacaacaacaacacacacacacacacacacacacacacacacacaactgaggttctaagattccagaattccaaaggtcccagaacactaggattcagggccctccccttctgaggccctggggtcccaaggctcagatccttgtgtcctgccacaagaccaggttggggcgggaaggaggttctgaccctgtctgtcctccccgacaggcccagctaacctttgcattgcaggccctgccggaagaggcccttgaggagtttcttgcaagcctggcaaacggtgggccgtgtatagctgtggatgaggaaggtgtgcggcaccttgaccttggagagcagcatcttgtccagctcaatggggcggcccgtatacgatgaggcagaagaggaggaagaggatgacgggggacggcgaggcaggagttcggtggtgctacggctctgtcgttggcaagaatggaggggacacatcagtgcgttggccccatgcctgggccaagtcacccccctagccaccaacccgtcccatcccccatctcctcaccagctcttcagccgtgcagggcagggactcggaggtgccgaggcgcaccgagtggccactggccagagacgtggatgacaggcgccgtttgcgggccccactacagttgttggggatgctgaaggcacagcgcttgtggtagttcagcccgcagcctgcagggggcgccagagagtaagagacatggcgtctgcccctcctaggtctcttcttgagaagttgtgccctttccacccaatctctcacctggtcctgtcccatcaccccccgccagcacgatctcctccaaaaggcactactatccgtaagtgtatcagccccttcaggcccacccctccttagagttctgccccaagttccagcttgtagccccaccatcaccccatctgtcccccagaccctgaacacacccacaccccttttctcactccaacaagggacacctcaaaggctccccccaaagctctgtccccagtttcagcttgtagccctgccatcaccccatctgtcccccagaccctgaacacgcctcacacccaaaattttcccactccaacaagggatacctcaaaggttccctccaaagctccacccctagttccagcttgtagccccgacatcaccccatctgccccccaggccctgaacgcgcctcacaccccaccttttcccactgcaacaatggatgcctcaaaagtccccgccaaagctctgacccagccccagtcctctatggtaagcacctccttctagtcctccccaaaactcctgtccatctccctagagacacctgttcccccttctaaccctgaccttcctttttctgaggcccctttggttccccctctttccccaaccccaactttccaaaagaaaatgcctctcctcacccccacccctaaggtcactatccctccaggtctgctcaccccctgtaccccactttctcttttctgtagacctggaatccaggcaatccctaagtagtgtgattaaatcttagtagtgtgggccacgcatggtggctcacgcctgtaatcccagcactttgggaggccaaggccggcggatcacttgaggtcaggagtttgagaccacactggccaacatggcaaaaccccatctctactaaaaatacaaaacttagccgggtgtagtggcacacgcctgtaatcccagctactccggaggctgaggcaggagaatcacttgaacccaggaggcagaggttgtagtgagctgagatcacgccactgcactccagcctgggcaatacagcgagactcagtttcaaaaaaaaaaaaagagttctcagttgtactcaggtccattgtaccatactaggcagaagtatgacttcttattgtcttattttattttgtagagacaggatctccctgtacccccggctgaagcacaatggcacaatcatagctcactgcagccttcaactcctgggctcaagtaatcctcctgcctcagcctcctgagtagccagaaccacagacatacactaccatgcccagataatttttttatttttatttttttgtagagatggggtctcgctacattgcccaggctggtcttgaactcctgggctcaagtgatcctcccacctcagcctcccaaagtgttgggattacaggcatgagccactgtgccctgcctattttatcttttaaaatcctcatccatggagaaatcagctcaactccctgtttcccactggacgttctgtatgtgtgctctaatacatctccagtgattccaaacgattccaggatcgctttctattctggagtgaagaatgttcctccagcctttgggagcccttctggtacccgcctgctccaggctttccagttccacacctcctcattgtaggcactgtcttggctgcatgctgtaatcacggaggcaagcttggagaacggtgttggccctgcaagaagagcttcagcagggcaaatggtctttgcacacaggaaccatttcccagtgttggccttgaatcactcatgtgccttccagaatttcagaatcttatctataactctcagaatgagtctcaggatagagttaaactcctgtcggaatgtagtcatttggggttctcttgccaccataggaactgggaccatcatctgtgatgctgcaccagtgaagtctgtgctgataacccattaggacttgatgacaccagggctgtatcatgacaaagactgcatatgctgagacctcaagagttggatatggtgtgtggacgatggcaatatttataagagcttttaatgcactgaatcagtatctgcaggcctagagtccttaaataatacaagtatactttggactgcatgatgatctggaacacaggatattggagaaactggatttcttttttttttttttttttgagacggagtctcaccctgtcacccaggctggagtgcaatggtatgatctcggctcactgcaacctccaccccctcaggttcaaatgattctcctgcctcagcctcccgagtagctgggattataggtacccgccaccacacccagctaatttttctagttttagtagagacagggtttcaccatgttggccaggctggtctctaactcctgacctcatgatccgcccgccttggcctcccaaagtgctgggattacaggtgtgagccaccgtgcctggcccagaatcaggatttctgtacaagcgtggcacccacggagctagagatgctgtctcagacctaatacccaatggaacatccaagaatatggctctaattgcagggcacaccatacaaaaatggaggcgcatggggcccagcgcagtggctcatgtctgtaatcccagcacttggggaggctgaggagggtggattacttgaaaccagcctggccaacatggtgaaaccccgtctactaaaaatacaaaaattagccaggagtggtggtgcgcacctgtaatcccagctatttgggaggctgaagcaggagaattgcttgaacccaggaggtagaggttgcagtgagccaagaccacgccactgcactccatcctgggtgacggagcaagactctgtctcacacacacaaaacaatggagccacagggtctcatcacagaatggatggtcctcacctgtcatctgtcctcatagccaatgcaggtacatggccttcatctgtaggcagagccccgatttcaacattctcactcagaagcatgaataacagggacagaggacctatatagatcttgacacttgggctgaaccttgagacatcttggcttaaagaactgtatgttttggacaggcgcggtggctcatgcctgtaatcccagcactgtgggagggcaaggcgggtggatcatttgaggtcaggagttcaagaccagcctggccaacgtggtgaaaccccgtctctactagaaatacaaaaattagccgggcagtaatggtgtgtgcctgtaatcccagctactcggtaggctgaggcaggagaatcgcttgagcctgggaagtggaggttgtggtgagctgagatcgcgccactgcactccagcctgggtgacagactgagacgctgtctccaaaaaagaaaacctgtatatttttaaactatgatttaaggagatatgtatgggtgctgttatggactaaatgtctgtgtctcccccaaaattcttatgttgaaaccctaacctccaatgcaactatatctggagacggtgcctttatggaggtaattaaggttaattgaggccgaaagagtgtggctgtaatccaatgggactggtgacctttttttttttttttttttttttttttctgagacaatcgtgttctgtcacctaggctggagtgcagtggcatgatcacggctcaccgcagcctcaacctcccaggcccaggtgatcctcccacctcagcctcttgagtagctaggactagaggtatgcaccaccatgcctggccaatttgttgtattttttagagacggggtttcaccatgttgcccatgctggtctcgaactcctggactcaagcgatccaccatcctcccaaagtgctgggattataggcatgagccaccatgcctggccttccttataaagggaagagataccagggatctctctctccgtgtcccatgtgagcgcacagtgaaatgatggccctctgcaaggcaggaaagcaggctacaccagaaacagaaccctgccagaatctggatctttgtctttccagcctctcacaattccagggattttgagaagtaaatgtctgtcatttaagccacgcagggtggtattttgttaaggcagccctgacaaactaagacaggtgccaggttgacaagagatggaccctgatagtcatgttaatgtgtcagcttggctaggcgagatccacagttattcagacactaatctagatgttgccatgaaggttggtttgtttgtggtttttttttttttttttttttttgagacggagtctcgctctgttgccaggctggagtgcagtggcacgatctcggctcactgcaacctctgtctcctgggttcaagtgattctcctacctcagcctcccaagtagctgggactataggcacatgccaccacgcccgctaatttttgtatttttaggagagatggggtttcaccatgttggccagggtggtctcaatctcttgacctcatgatccgcctgcctcagcctccaaagtgctggggttacaggtgtgaaccactgtgcccagtcaaggtttgttttttcttttcaccttctcaacccagcttttccccgactccaggaagaactgggaagagaaggccccatggaggtattttcttttcttttcatttttttgagacagagttttgctcttgttgcccaggctggagtgtaatggtgcaatctcagctcactgcaagctctgcctcccgggttcaagagattctcctgactgagcctcccgagtagctggaattacaggcgtccaccaacacgccggcttttttgtatttttagtagagacggggtttcaccatgttggacaggctggtctcgaactcctgacctcaggtgattcacctgcctcggcctcccagagtgctgggattacaggcgtgagccaccgcacccggcccagtggaggtattttctggatgtgatgaaaatccataatcagctgactgtaagtgggagaggtgatcctgcttgttctaggtgggtctcattcaatcagctgaatgttttaaaaagcagatcagagacttttcggatgaagaaattccacctgtggacatcagcttcagcttgtgcctgagttcccacttgcccttcctgataggatggatttttttttctttttctttttattgttttgtttttgtttctgttttcagaaggagtctcactctatcaccaggctggagtgcagtggcacaatctcggctcactgcaacctcctcctctcaggtccaagcaattctcctgcctcagcctcccaagtagctgggactacaggcgtgtgccaccacgtccggctaattttttgtatttttagtagagacggggtttcaccatgttagccaggagggtctcaatctcctgacctcgtgatccacccgcctcggcctcccaaagtgctgggattacaggcatgagccaccgtgtccggcctttttcctgtttttgagccagggtctcgctctgtcacccaggctggtgtgcagtggtgcaatcagggctcactacagtgtcgagctcccaggctcaagtgatcctcccgcctcagcctcccaagtggctgggaccacaagtgtctgtcaccatgcttggctaattattttttgtacaggcagagtcttgctatgttgcccaggctggtcttgaactcctggcctcaagtgatccacctacctttgcctcccaaagtgctgggattactggcctcccccactgtgcccagccagatttgagttgcctagccagcccacacaattctgtaagctgattccttgcatataaatatctcaatatatatctcctcctggatgtttctctgcttgatccctaactgatagaggccccaccctcttcccccgccacccttctgctcccctaggctctgttcttaagcccctacttgtccctcccagctccacctcctaggctccgcccctagacctgagccccggcccagccccaccactccttccccaagctctgcttctgggcccatccttcttcccattattacttcctaggctgcgcccccagctctgagacccgctcctcctccccacgctgtccccgtgccaggaccattacgctccgcccccggtgcagagccccgccccaggccccgcccccaaccctttagctctcaccatcgcacttgaggccctggcgcactaggccgaagagcatctccccgcagtgatcacagaaggcaggcgcccgataggagtgcaccgtgagggcgtgcgggcggatctggaagtcctcgaaggtggccgaggctgtaggcggaaaataggggtggatgcttgaggcggggtaggccaaagcttttccagaccccacgttccctgatttctcacagtgctcccagccgcaaggtgtgatctttccttccttccttcatttgctctcatactacattctgcctgggttcaaatcccagctccacccctgaacaaaacacatatatccctacgccctgggcagggacagagcgggaattggggagttgtttaacgggcaaggagcttcagtttcgcaagatgacaacagttctggagaccggctgcacaacagtgtgcgtgaactttaaattactgaactgtacgcttaaaagtgcttaaaatgttgtgggcttttttgtttgtgtttgttagagagtttcactctgtcacccaggctggagtacagtagtgagatctcggctcaccacaagtccgcctcccgggttcaagcagttctcctgcctcagcctccagagtagctgggattacaggcatgcgccaccacacccgactaatttttgtatttttagtagagacggagtttcaccatgttggccaggatggtctcaaactcccgacctcaggtgatctgcccgcctcggtctctcaaagtgttgggattacaggcgtgagccactgcacccggcctaaaatagtaatttttatgttatgtatattttaccaaattaaaaaatttttaattaaaaataccaccaccaacaacaaaaaagaacatggataggcggtgcccggtggctcacatctgtaatcccagcactttgggaggcccaggtgggcggatcacttgaggtcagaagttcgaaaccagcctggccaacatgatgaaaccccgtctctactaaaaatacaaaaattagccaggcctggtgccgcgtgcctgtaatcccagctactcaggaggctgaggcaggagaattgcttgaacccgggaggcagaggttgccgtgagccaagatcatgccacggcactccagcctgggtgacagagtaagattctgtctaaaaaaaagaaaaaaaaaaaaagcccagtgtggtggtgcatgcctgtaatgcctatagtccagccacctcaggaggctgaggcgggatgattgcttcagtctgggaggtagaggctgcagtgagtggtggtcatgccactgcattccagcctgggtgacagaacaagaccctgcctcaaaacaaaataacagggccgggagcggtggctcacacctgtaatcgcagcactttgggaggctgaggtgggcagatcacttaagatcagcagttcgagaccagcctggccaacaaggtgaaatcccgtctctactaaaaatacaaaaattagccacgtgtggtagcaggcgcctgtaatcccagctactcgggaggctgaggcaggagaatcgcttgaacccaggaggcagaggttgcagcaagctgagtttgcgccactgcactccagcctgggtgacagagcgagactccgtctaaaaaaacaaaaaataataaaaatgacaaaaacaaaacaaaactcaggtttaggggagagacaacaatgaagataaaaattcaagtgaggccagcttatgatatgaaagagtacttaaagcctgaacaaggtcactaaaggtgtaaatccagacttctgtcattcattcattgagccggtttcactgggcactgcagtatgccggagcagcagggaaggcagccatgaaaaaggcagctgcccccaccctcaagagggaccaagggccatagactgctctaaggtgctgagagcatgcccatctatactactggaatagtgagtggatgaactggcttctggctgtgtcttagaaaatcacctgggggcttttaaaaatactgatgtgcagattccatctcactttgcagagattctgatttaatttagcattttcgtggcaggagccatggacatcataacttttttttttctttttctactttttttcttttttagagatagggtctctctctgttgcccaggctggagtgcagtgacatgatcgtggctcactgcagcctcaaactcctaagctcaagaaatcctcccacctcagcctcccaagtagctgagactacagacgtgtgccacctcgcccggttaacttttttttttttttttttttttaagagatggggtctccttatgttgcccaggctggtctcaaactcctgggctccagcgatcctcccacctcagcctcccaaactgctgggattacaggtgtgagccactgcagctggcccattttttacctttatatttaagcataacacagtcagttacagatccaactccttcttctcctcttttcccccttctaactactgcacttgactagttttataaataaataagtataacatatgttcaggaaaggccgcacatcacaagtgcacagctcaatgaattttcaaactgtacaaagcgtgtcactagcatcctaatccataaatgaaagtttagaccagtccctaaagagcgccttcatgaccccactctgtaaccatcttccagaagcccccaactctccttatttttttttttcagagggagagaaaggggtagagatggaatctcactatgttgcccaggctgatctcgaactcctgggctcaagcgatccccccagctccagctcagcctcccaaagtgctgggatcacaggcgtgagccactacacccggcctctcctgacttctaactccccctaccctctcctcccccagatgccccgcccccacccgaggccccgcccccaggccggccaccacctctcacccgacagcaccacctccaccaggtcgccctcctggatgtctccggacgagcgcaccagctgcaggaggttggccgacgtggggtcatgtttgaaaagcaggatcttgtcgtaaaggccgtagaagccacactcagggaactgaggggcgggagagggatgtggcgacggaaaagctcagagccgccttcagcagcgggcggactgtgaccctcccagggcagggccggctgtttcccccggaaacgcagagaccccgcaggccctcgcttcctgcctgccccctcccaaccccagcgcgagccgggcaggatgccagcgccccaattgtacggggagggggcgccggcgtgggtttggtggctggaagggggagctggggtgggagggagagtggctccgggagcgtggacacctcgaattttccggaacctggcggaggtgggaggggatgctgaatgaacactccctcccctgtgcctcctccccaggctcacacacccgccccccagcttccttcctggatctgtctattgttgtcccagttacctggctccaggcccagcactggggtggggcgagctggaaggaggacttttcggggctcctgggaaagtgggggggggggccgggggacttggactcgagggcgctggagataaggagggcgcctgccacccaatgctcaaaggacccaggtgtctgggtcctcagctttgggggcctgggggcaggaaatgaaacctagtagaacagaaagtgaaactgccccggtggggcctcgggaaggaaggtaagcggccctaacacacctggacctggcagaaaaataaaactggggtgaagcctgagcggggcaggctggggacttgagcactggacaaagaagttcacccaagggacaatctgcccccgtacccccactgccaccagcttcccatgaagtgggctgagttggggtggtgagctgggcctgcgggattgaggcatttggtgggcaaaaccctatcagttctcactgctaagagagagtccacagaagaccaggactgccttggccctgaccccttgggaagtttttctctaagcttcagtttccttgtctgtagaatgggggagctggcccagttccccacgtttctctgatgcccaaaggattcatttccaggagtctgaaaagattctggaatttggatattttgggactccaacatgctcacattatagaattatacattctagattcctacctggtatcactatacattttaggatttcaataacctaaataagcggtaatctaatattttaatattctaggagtctgacaagctaggactgtgctctttgaattctttagcattcaaggacctcatccatccagcattctaaaattctaacattttaactttctaggattcaacaatctaggaatctaatattccagcattttaatgttttactatttcacaaacctagaattctaatatttgaacacgaacatgggggcaatttaattgcctaggatgcatattccaacaagttatgattctaatattctaacatttctacagtccagtactccaacacagaagcccactattcttttaacatttcacggtttagacgtggagttccacctggtttcctcttgccataacacccagctgcccaccctggggaccctggtgtccaaaattaagagtaggctaacagcactgtgactaggaaagggaatagagtccccagggtctgtaggagtgcctgcccctccacacatatctcaggcttaggggagggcagaattgggctccgagacctcacttgcccctggcagctaactcaagcacctgcacccacacatgtcaccggatcaccatggccagcccgggttcaatttctcctgtttccaccaaatgggaggcccgggatgggcctggacgtggaggtccgccgacatctgctgccccttcctcccctctctacacctggctggcccctcccttcctccctgtttgctgcagaaaacaacgacatgcagggacatgaaatttggggaggcctctggggcaccccacccctgcccagtcctctctcaaagggatggtggggagaggggcaatggaggggggcaatgccccctatccctccatcacccaaagctcaggtctccttcctccctcttccgcacaccaggccccagacccctctgccagcgccccctccttcaacctctccccgagctggatccagggagcctgcgccctcaccttctggtccacgatggaacaggccagctgcttcacatgagccagctcggaggcggcgggcaacagcacgaactcgcgggtcagcccgatctggatgtgaaaggagaccccggaacccggggccgggatctggggcagtagcggtggcggcgactgcagctctaggccgccggggggcggaggagaccccggcccgggagagccagggagcccggcgggataagagggggcggtggccatggggggaggccggggaccggccgcctggagcccacccgggacccggccggggggccccgggggaccctgggttctagatccgcgggatctcgtgagcaggtggtgggagagcggggatccgagaaaagatctggcaggcggaggggacctgaggatggcggggtcctgggaaggagagaaaggcactatagtgggtcagaggcccggaatccagggctcccagaagatcagaaaggagaaaagtagtgggttggaggtcccagcgattgagattccaagaagcctgagaggaaatctagtaggtcggggtcacagggatcaggagagcccgcgattcaaaggccccttccctagaggagggattgagaagggggcagagggaatcccaggatccagtgctccaagaagaggatcccactcagaaggcggcccgggggaattcaccttgggggtggagggcaggagtctctgagtcggggaccgagtggattccagagataaaggggttcgcagggacccgaccggccaggggatgggcagaggggtcccgagggccggagtgggtagaagggaatctcacgagtcgcagaagttggagaaaagttcggtcgggagccgtgaggaagggggcgttgccggagcggggttgggtggggggcagggagggtcgccaggcgccagtagctctttttccccctccaaagtttaagtcggcggcggcggcggcggcccaggaggaagtgtccggagcgacagtgcagtcgaccaatcggcgcgggcctcggcgacgtcagagaggggcggagcctgccgaggggccgggggcggaaggggagggtgggcccggggcctccgagttgggggctggacctccgcctccagggtccgggacaagggatggtgtgagggatggagggcaggcaggcgagaccagttccttccctgaacacagccaagcctggaaagttaacttttccctcggctggacagggaggggaaacactatcacccaccgccggtcgcaggcgtcgggcttggaggccactggccctttaaggaggggagccctctccggcaggcgtccggcgcccatggcaggggacgggtgggaaatcggtatcaggtcccggcccgctctctgggttcggcctctctgttctccgagcgtcacccctgccctccccgccgcgtcccagcccagggaagggggtgctgcagagcgtcccccggccccagcccatttaacacatggaaagaccgaggcctccagatgggtaggaaggggctcgccttaggtctgtctccagcgatggtgggcaaggtgcatggcgctaactggatgggtggggagggtccatccccccgcccaccccaaccccgccttaggatagtgtggggctgccccgagggaggacagcacacccataccacttcatagatgcagagtgtgtctcctggggatgtggagtacgtgtgcgtgtctttctctccatgtgactttgggtgagtggcttctctgtgagcctcagtccctccatctgttgggactgtaataggactgaccccacatgggatggtgggagccgatgccatggtatactggtgcctggaaacgcagcagttcagtaagaggtggttgtctctgataatacgcggaaaggggtggccacctccagcactcaggctttgatgggtgggcacacccattcagtcacccagcaagtatctgtgaggacctactgggtgctgggtgggccctgctgtaaaactccagccgctacaggggtcaggcttgatctctcctccccagctaataatcaaatagtggctaccatttagtttacacagaataagctgaagcctcagagaagcaaaacgtcttgcccaagatcccagagtgaagttgcttgagggaagctgccccacccacccctttgattgacaagtcaaggcctaggtttgagctctaagagaagggccacctgtctggctgggatgctggcaggactggaaatggcagggctggctgaggatgggggctgccagaagagcccctcttcctggtgtacggccgttgggggtagctgaggtcggtacagtatcgattctgtcaccacatccgggggctggggctgaggaaggaagtctgaggctggagtgaaaacccaaaccaccacctggggaactgcattgagcccagagggatgggcagggagcacaccacgtggagcccacgaaggctccccttggcgtcatctaagggcctcctgcccacctgcaccctttttcctgaagggcagatgactgtcccagcaaaacgctgccatgtcctgagtgtccagacagcggcctccatcctttctcgtatgttcactggggcctgctgggggactggggcacagccctttacaacccaggaactgggcattagtgccctgtggcagaggtgctaggattaccgaggacgcctggctggtaggtggtggaagcctcctcgagacaggagcagcggtcccctccgtctcatctggagcatgtggacacctgctccctctttttaaggctgtggacccagtgaaatgccatgtaaagcactcagtacagtagacgtggaccactgagaagggaaaggagggacgcatcaggacatgagccacgagggctcgggcacctgcggcacctcctcccagcatggaggagcctgcgccccaaagccatcatcctccactggcaggtgcagccttttccctccctgctccttgtgggcctgggatgggaacaggaagggggtttacgtcctctgggcaccagccctttggcctcgccaccaccctcacacatcccaggcggggctgaggcttcagctggactgtcatcatagtatctgctccccagggctctacccctggggagggagcacttagggacagaaagggcacaaggagattcggtccagtgcctccacttctctccacccacaccccacccaagctctgggcccgtctccggcccctgctgccctaccacaaaaccccaacccatcatatcccctctctccaaactccacccaacccaggcagagccggtcactcctcccccaaagtccccagtgccctcaacagatggcaccgtcacccatcttactccaaagggtttattgagacaagttttcacatacaagatggggacagaggggttggggcttataaacaggaacctggaaggggaccgagggtgcagggtagaaccaaacaagagagtgaaataaatagagggaaagagtggagacagggaggagactgactgagaccatcacacagtgataatgcgggtggggcggcgccatgaaaatcccgttatttatacagatatacagggagttcagggggacccgaggcccactccaccctccatgccccagggaggggcacaagaaagccgtctctacccatgggcgaccccatggggcgctgggagggctgccctaggagtgttgggcaatccctggcctggaagccttggttagtgtctggaaagcagtggagagggccggaggggaggggcagccaggccggggctcagctctgaggctcccggctgccaccctttctcccagcacagctcctgcccaggtctgggaggatgggggatgggggagcaggagctcaaggggagaacctggcaccttctggagtcttggaaaaactgatccctaaagacacccggccctggctgtgctgccctctggaaagcagctctgataccaggagcggctgtcagggcacagggggaaaccccgaggccatcctcgggggtgattcctgaaaggggcccatccccaggctggatgcttggggaaggcagccgttggggagggattcctggggaaagggccgttagcaccaccaggctccatggcaaacagacagaggccaggcctctgcacctccagcgaggctgggagtcccctgcgggaaagagaagggaggggagactgagccgccgcctctagggcgcctctaaggcctcaacccctcccctgcatgcccagggctcccccagtgattctcacaggacgcccctgactggactgcggggctcagcacacctggcagtactaggcatgggcgtgcagagactcagaatgcggggtttctgccctcacctcagccccacctgcccggccctacaccccagccagcgtggcggccagggcagggccaggtgggcatcatacgaagaccttggccagggcatcagcgccagcactggcaatgagggccttgctggggtggcaggcaacagcgtggatggcctcctcgtgcttcttgcggtgggccgtgatctcctgcacgcacgttttgttgtccaggctccagagacgcagggagcagtcatggcctgcacatgtgtcggggacagaaggggtggtcactgggctcctcgctcagacgcagccctggaacccctcacctggccttgtccaaaggcctcaggggaagtggggctcaactctcctctctcaccctctgctcatcacctcctgtggcccgcccaaaggagaaccctggtcccctcctgtccacagtccatctcatcccccagcatttcttgagcagctactgcacactgagccccagggcggcaggggcagtgaacaaaacaggcaactctccctgccccgcagcactgacgctgcagctgggcaacaggaagagaaagaagaaagcaacccagccggtcagtgtgaggacagaatggccccaggaggaatgcagggagccttccaggcagaaggacaggcgggaaaggtcctgaggcaggaggtgggggtggccacaagagccttagcagggacttggggagaagaggggagaggacggcaggctgggcagggccctggcgaggagaagtttaatttagggtcaagaggatcaggcagggcaaaggctcagctccctccactgtctagtggcccccagaatagagccctgtctgggcactgggctggagctcactgaccagcccctcacccaccagaggctgccagcacaggcccggaggcagagcccagccacagcctccaacaccacggcctgcgcctctgtgcacacacactcactgctgcactcactgcaggcctcacccttcacccccacagcgacctccagtctccttctccacccacccacgtcacactccatcccttctaagcacagccacgttgctggcctcaatgcccttatccagagacaacagggtgggagcacagaagtcccacgggtacccccaggtagacctggactgatgttacagagcttcaatggccaagttacaaagcgtctgggcatcagggcccacatctgtaaactggggatcaaagtaccaaccgcacaggctgcttagaggccgaatgagacgatgcagctccagtgacccagaggagggccccagcggactgtgctgccccctatggtcaccacggtcattcccgcccagaccagcctcccccagccctggcccccggggccccctgagcacttgcctggagccagtgcccaggcctcttcctccccttctccccaaccctggtgggactagtgtgctcaacttacttcctgacatcaggaatgcgccgttggggtccacggctaggcaggtgactgcgtccaggtgtgcaaccatggagtgcaccggcttacctgaggcgagaagggcgggtggcaggttcccctcccactctgggcctcgcctgagagagtgaaaggactggacgagagactcccagagcctcccacagggacgcaagcatctctgctgcctgcctctggccctccccacccactacgagcacaaggggctaggcctcacctgtccgattgtccaggaagcggatgcccctgtcgtcgtgggcggtgatggtgagaggctggtttggatgactcaccacttggttgatctgggttggacctgaaggaaaacgcaggaagagggaaggatgtcaagcagaaaatcaggaagaccagaacagaggcacaagcgcagcgtgacagcccctacaccagcctctgcctggatgtcgaggggggctgggcgagggcactccggtccccgaccgcagcgctggttctgcacaagcagcccctgggccctgttttggggcgggggaagaggaataacaaacatgaacacattccgccactctaccaagagggcccgacggggcggccctgacgcgctctccccactcagccccgccagtgccctggctgtgagggccgggggccctccactgggacccaacttccttcctgctcagggcctgagggtgcaggggagtcatctgagctgactgacaaggggtcgccaaagccccaggaggaagtggggcccagaagacactgagaccaattccatgagctgatgtcagcccccttaccgctgctgccccgggactccagcgtgaggagggcactgccaacctccatgtcatacaagacggtgtcgccagagcggaaggaggccacgatgtgggcaggctcggtgctggtgaaggccactgaggtggggaccccgtgctctgagggcacagggaagagaaggctgctgaatggaccctcagacccagccctgccccagggtgggggacagtgggtgggaggcctggggcctcagcaggaaccactctgatagcctccagatcccgcacagctccagggtgaggcaccggggcccccactcaccgctggctgtggggaaggtgcagaggcaggccgggctgctgctgctggggtcccagatgcggacggtgccatcagcagaacaggaggccaggcgctgggaggtgggactgaaggccaggccccacacggcgtccccgtggccctccaggacgtggctcagcacgcttgggtctgcacccaccgcagggaggaaatgggctgtgtcagggctgccagctcctccctggacagcccagagccccagctctgccaagccccaggcagctgggctccaatcacccacgcacccacttcacacctggtgcccctcggaactgtccactgccaggacagcccggcagctgctcacactgcccactagctctccaaggaaggttctagggctccagaaggcagggatttccctctattcacagctgtctccccaagcagggcccagaaactgggagctcaatacagaatttttcgggctccattaaggaagaaggaacagcatggttctgtggccccaggagcggcacgcagcctgtgctggacaagggttggtcccaaccctggcccgagcagtcttttcagcccatggccaagtgcatgggctttgcctggtctctccaaagccccctggtcattcagaggtccaatcactgcttccctggttgctggagtccacaccagcagctctggcctgctgacaccgaaagtgtggtggctaatgtagctgggaccgatcctgaccttgtgcaggtgagcctgttctctaaagtctgtcctccccttgagaggagacaaagacctctgaactctgcccagacaaggtggagcacagggccaggtgcatgatcaaggaggcagagccgggcgcagtggctcatgcctgcaatcccagcactttgggaggccaaggtgggtggatcacctgaggtccggagttcaagaccagcctggtcaacgtggtgcaaccctgtctctaccaaaaatacaaaaaatagctggatatggtggtgcgtgcctgtaatcccagctactcgggaggctgaggcacgagaatcacttgaacccaggaggtagaggttgcagtaagccaagatcacgccactgcattccagcctgggtgacagagtgagactctttgtctcaaaaaaaaaaaaaaaaaaaaaaaaaaggcagagaacagggggacagatgttgaacagaagtgacagtctggtcacttccctacttaggtcttagatgctccaaagagaaagccccaacgcgctccagcctggcccagctaactccaccttctctgctttctctggacatgccctcccctcaaccacgcagagaccctggcggatccccacacacagagtacacggcatggcagagcagaggctgccagggccagccacgcctgtgcatgggctgctcccagcctgggctgcctcagcactgccttctggacgccggctcacagagattctcaggcagcttcaccacctcctcccacagccatcattcccatcccggctggctcgtcccttggccacgcgctgcatcgcgctgctcacaacagagcagacaggggagccgtcacacgcactcctgaggcctgcagtgttggcaagaggtggacgcgacgtgtgtgtgcgtggaggggacggccaggccccagtggatgtgaggggaaggcgggaggcgttgtcctcaccgtagccatcatagggatccatgctgaggtctggaatcttccaactatggatgcaggcatctgccccgccactgtagcagtattcactgttgctgcccatagccacagccaacactgggcccctggaagggacaaatatgtggaaagggggatgagacaagctcagggcctcccctggccacaggacctaagttccctactagcattcttcaaggatggccaaaaggaattcagtgactggggctctggccatgctacctggacaagctgcctgtcccctgccctcccccaccccacctccatctcctcccctgaagggctgtgctgagtaccagctgccagggcatgtgaaagtcagcatggagccccaagaaccagggctgtgtatatcatgaagggggcggggactcagagccccctgctgtcctgcctcctgccgtgggcctcccgcgatggcagtgagcaggtcaggagtcaggctgcatttaggacgagtttctagcaggctcaggggcacctccctacctgtgagcccggaaagcatgtataggttccacatctagcgccgcattcctgtgggatgacagaggagcctgatgtcactgagaccctgtcacccccgtccccagatgcccctgcccccggctctgagcttgctgccctcacttcttggccgtgaccgccttctgcaggttccagagcttgagcgtgccgtcctcggaggcggtgagcagagccgactggctgtggtggaaggccagggaacgaatgccgtcgtagtgcgagcgcagggtgaacttggggttccacgtcttcttaaaagcatctttgctgtcagacagctggggttggggggagctgcctcagtgtcttcgcatccatcccagcagtcatgcagacaccgacacccagggcttgagggcccctgtcttccacccacatgaccctggcaggaatgccctcagagcctgggctccagccgggaactctccccttcctctgctgggcagagtctccatgctcgcccaacaagtccccacactgcgctgggttctggagagacaaaggtgagcctgaccccttggggtcttgcagttgagaggaaggggaatgggggacacaactggaccatcccacaagtgtgcaggatcatcagccatgagcagggcaatgaattaaagatgcacagagagacatcaggcagcctgccctcctccctgggggccactgaggctttcctgaggaagcacgagccagcaggacttcacaagataaggagagggccctggagagggaaagggcccgtgcagaggccctgaggcagcaagggcgagcccaggcctgagaggtcagtggtacaggctgcaggaggcaaggagagtggcaggggatgagacaggtgctgggtggtgagccccggaggaatgcgcatttcatcctaagaaaaagcctcagagaaacaaggagccggggaagtgtttagagcaggggaacgacatggcttgttcctgccacccctgagaggctcagattaggggcaggtaaaagtagccacagacggggcacagtggctcacgcctgtaatcccagaactttgggaggccaaggcagaacgatcatttgaccccaggagttcgagaccagcctgggtaacatagggagatcccctcaaggagcaaaaaaaaaaaaaaaaggtagcctcagagaaagaggttgagaggccaggaagtcccaggggagatgagggcatggagaccagacacgtgaccatgaaggggaggcagtgcacaagtgggagagctgtgggggcctctgtccaccacgctgcatgcgccctggtgccgctcacccagcaggggacccggagagggccaggttccggagagatgacgagcagagtaccaggcaagcctcagcaccatgccccaagatgggctcccagctgacgtccctgccttagctgtcccttctgccacagttctttagggtcagaggatctgctactgtgtggttcactcaccccctcccctagcggggctcagaacactgcacttccccaagatgaaatgacatcttggggcgtgcagagggaccccatggcacactccacttctcaggcctctgctctgaccccccttcctgaatctcacagcagtccccacccagccttactagggtcaccaacactggaaatcccattctgtcacagtaaaatgtgcacatacacccacaccaaaagctcccagctggccaaaggctcccagctggccaaaggctcccagatggccagaggcccgtccactgaggcccggaacatttcatttcagcccagctgcccattcacactagattggcctgacttggcagagcagggggtggctacaggtcatcttcctgcattccaaatcaccagggtgggaggggcagagtggaggagccgtggaactgtgattaaaacacaggctccagagtcttccaggccctgcgccttggcgaccgcagtcaagtccctccactgtctacatctgcacccctctgtgaaacaggatgagcagggcacgggcggcacccagtcagagcttgcaggggctggccctgggcgcaatgccaatggggacagtgtggggggcacccggagaacttacatcgcagctgaggtcgttgtcgttggtgacggtgagatctgccaagtcccccaggctcacctccccgcccccgatagtgtccatgatgaagacgtctgaggagaagccaaaggaacctggtagggggaggggagggaggggcagagagggccagggagagagagaatgacagagagaggcagagaaagagataaagagcaagagagagagacggggagaggacaagatgaagaatcacagctggaaagagacagagagacagacagggcaggacagacaaaaagagagggagacagacagacagacgaacttttggggcagggaggctgcagactggaggctgggcctcgaccctgaagacacagaagccctgggctcagctctgcagcctccctctgccatgggcccgcaggactgggaccaggtggggggtgcctcttaccttcatgtggccggggctggggtgtgccaggaggcgggccagtcacttttgggggcagcccatccacatcccgcaggtcagccagaatgccttggagtttgacccgacggctttctgcagggtcgaggcatagggccggagtcacccagcagttccaacccagtctggcataggtgacgccttccccacactgagggccccctgccactctgtggggctgtgaagctctggccctgggggagggggggaatgggcagaggagaggaggttgattgggcccctccgtggggcagtgggcaggtcactgccttgcctaggcctcaggccccagccacccatcccacgtatcctgagagccctcctagctaggagtcacaggacagggaggaagatgcggccctcccacctgcctctccccgactgggtcctcatcctgttccctccttgaggccagccagagctggacgcccgccctggagggctggcggccccacttcaggaagagccaggactgcctgcgtctccatggggattttccagggaaggggtgaggggccggcggccatgacctgggcctcctgctctccttggctaccctcctctcaggaaacatatccgtccggtagagagaccctgtacaggaagcagctgcgggcagctgagcctgctcccaccccctcggtggggaaggcaagcgggggctggccagaaaacgtcagctcacccagctcatgggggctcccatccacagtgcaccgccgagggtctggagccccttccccatcctctcctgagcccaggaaatcaaactcattgatagcatcctcagagtcgtcttcctcatcctcgtcttccatttcgggcaccagagccttggatgggagctggcacatggagaaagccagacaagtcagggggcctcttgtccagagactaagccacctccgtgcctaggaacaggtaagccggggctctgggcccgtttctgttcatggggctgcctcagccgccagccagctgccctggagcgccccctgctgggccttggacagctgctaccactagggccggtcggcctgaccccaccctcacgcagtccttcccctagccagggctcagcctgctccagtcccccagcaaggtgcctcggatgaagaaaagtcagataatgcaacaatctgcctgcagggagggcagatatgcactggtgtccgtgtgtgaatatacggaggtgcaaacaagtgaggatgaatggaccacagcattgcagcgataaacacagcaccagcagccgtgctggcacaagagcaaattccactcactgaatgaccactgactacccctcgcagacacgacttcacttaacccccaaccctgcgaacagctaccgtgaacactgtcattatcattcccacattacaggccaggagacaggctgagcagcaggaacccacttgccctaggtcaccaaggccaagctctgcccactgtgaactcctccagggcgtggctgaccccttccacatgtcagccccccaggctgagtttggcgacacctctcgggcaccagtgaggggccagcctctgacctgcatgggggggaccagagggaaggggcatggagaagacctagggccaaggtttattcaacacttgtgcaaagaatggggaaggggagggtttagacagcatgcccagaaaggcagcggccgggctcaggactccagaggagagaaccaccacaggtgctctgaggggcacacgagtggcaattgtgctctgccaacagtgcctggaaccatgagggctccaccactaccaagtgccaccagcgccactaacacctactgagcacttgggggacagccaccatgcagctgagggcttcctgggcaccagctcattctaattaaatcctcaacaactcagacggagggactcagccccatctaaagggtgaggagactgaagccaagacaaagaagtgtgggccagaactcacgcagctgggccagggccccctgggagccatgggcagtcccctgggttcccagctgggcctcgatggagggctgctgcgtagagacagagagccctacccaaccagccagcccaagggtgtgggcccgaaggggtgcaaacaccacggatgattcctgatggaatgggtggaggggtggaaaaggactagaaattctcagaggggtgggaaggaccaagcgtctggaccaggggccagcatttgagaccctggactcagccctcctgctcttcctctaggcctcctgcagtgctgcggctccgtgcacaccactctacttggggtgcgactctgtgctgagccacactggggatactggagatgcagtggaggcccacacaggcccagtccctcccagggagaggtcaggaggaatacagaccagacagggaggaccccagagtggccagggccagggaagggagcccagggtgagtcagagaaggcttcctggaggagggggtgtctgagctgagtctaaaggaggaaagaaaggggacctaggcaaagggacccgctaatgggaagcccggggctcagggaaagctccgaggccatctgccacaggtgcctccttcataggcacatgcccctgcctccaccacaacgcgtccttctgcacatgactatttacaaggccgctgctggccacaagctcctccaggccagggcctgtgtgtctccatatccctgctgccagcacacaccgcagcccctgaaggcccaggctgactcggaagggcttcgatcaggtcacacccaggccaggctgtgcagggcatggaggaagggctcaccttcacacgctgcttcttgtgctgcacgctgtccagctcatcgtcctcgtcgctgtcttcgtcctcgcagttctgcaggaaggggatctgccccagcactgagccgcccaagcgctctttgccatctttgcctgccgcgttcctgccaaagacagcagagcagaggaggcatgagtcctggcaggtgtcaaagctcagataggaaggtgccctcccaggcttggtggccagagcccagacccagctaaccccctaacccctgagcagccttgactctggtcacacacagagccccaaccccagcctctgcccaacaaatgctcattccaactggaagcctcactcagaccgcaaacggggcccagctcctcaatgaccgccgacctgagtttcagagggccagcccccaaccctggtcacaaatctccatcctgtgctgagtcagaaggaaagctggatgagaaagtgccactgactcagcagtccccattcccacagcccagtcagaccacaagggcaggtcaggcaggaggcaaacacgccctgcaggaaagaggaaccggccattctacaaatgctctgggaggcgccgaaagccagccagcctcgcgcaagcaggggcgccggcgatccctgctacccaggagcctgcactatccccagcaacagatggcactcctccttccacctcctggcttccaacttcatgacaagttatagcagaggaggtactgacccagcctgactgcgggagaaggcagggtgcaattccaagtgcagatcgacgaaaacgtcccccctttctgccatcaggttgatgccctggaggtcttgtcaactgccagttaccaacgggtgcagaggtcactgcagatgtaccctctcgcctcacggctgccatcaccagagctccactccatcctcagaacactcgctgcacttgcagcgggacacaggactccattctcaccggccttcctcccacaacgacactgacacgccgcacaggctcagcctctttctcagcttcctcctcctgttcctccctccagcctctaagtgggagagcacccgggcagtccccagatctcttctctgcgtcatctacactcactcctgcaggcactgcagacggccatggctttccaaagaatgcccatgtgcttgttcaactagacctatgtttaggggccaaatgccccgcagctccagacgagctctgcttctccacatgggggtaaacaggcccctcacacttcacacaacctcggcggcccccagaacttccactcccaggcttccccgtctcaggggatgctgctccaatggctcacaccaaaccctggagtcgctcgtttcttttcctctccccttagctgcagtccttcagtgtcgactgcctgaaagcctctggggaagctgacacctctcgcctcaccaccgctaaagtccatcagctctgtcccagacatcgagccatctcctaactggtccgcctgcctcctctgtgaccctcccacacctctccttctcagagtggatcaggtacgtcagattatgtcaccccgctgctcgaaagcactggcttcccacaaccctgagtcaaactcagactctatcccagcccaaggccctgagtggctgactcctgagaccacaacctccccgcagcccacgcctcactgcctgcggccatgccggcctcgtgctgcttctgtgcaggctgcgtctctcctgcctctggacctcggggttcactgtgccctctgcctagaacattctcctcccagccactcgtgtggcttaccctccatttaatgcccacagaggccctccctgcccaccccctgcagaggagcacatattggccctcgtggtctccatcgtgcttagcatcacctacgtggcctcacttgttctgcttaactgacaattgctgatgagagtgaacaagccagagattcctgagggtggcgaccacgtgtgctccactccctgctggcgaggcacccagggtgtgccttcggtaagcaccccactcgaccgagaagcgggcaggcctgagtatcaggacgggggcagggctggagatgaggccatggcgaagtgtgtggagggaacccaggacagaatccgggggatcccagcagtgaagggactcagggtttcagaacaagggagcccacggcatactccaggaggaggggccgccagggcacccagcgccatcagctgacactctgaccctggccttcaccagcagtcaggaggaacagagagacacacctgccatgtccacgggctcacctctttatctgctcctcgatctgtttcaccagcagcgactccccaccactgagccctgcagggcctggtggagccctgggggccccttcactcggctccactgccccgttgagctccagcgagcggcccagcagggaacggacgcgcttggaccgcatgtcgaggatggtgtctgtgtagcccacctcttccaggtacctgcaggggtgcagagccacgtgggtcagacatcccctgggcttcttcatgtaccacaggggccaatgcaaaccgagacaacctcttaaggggccacttaagagcatacaccaaaatctgacataagcacaccctcgctccagcagttccccgtcaaggctatttccagtggaagcccttgtacacacacacaatgctatgtgtgagggtgctccctgcactgctgtatggggaagccgaagcacagggaccagcctcagcacccaccgacaggggctgtgtcagcaaatgactcatagcgctgcaaggcagaagatcaacagggcagagccttaagggaagctggccacggtaaacagcagaacgaaaacgctaagttctatgatccacatgatgccaatgtttgtagaaaaaaacaaaaaggcgttaatgtgcataaagcttacaccacacgcaaacacacgtttgtattatgtcccccaagaggcctagaaagatccataaaaaacataacagcagtgacctctggagaatgggattaggggcgtaagaggaacttttgcaacttactctacttacttctacaaatgagcacttattacttctgcaatttaaaaactgaagccagctgggactggactaaaagtaaaaaaagaagaaggaaaaaagaacaaaaatcaatttggggtatctgtggcttcaaaatacagcgacaacagtcccttgctactcctcaggaggcttcctggccaggccgcctttgccgttccctgtcccttcgcagctctgaccctgtctcttgaatgttaggctgcacgcacctgcatgtacgtctcatcctgtgcgcctgtgtgtgtctgaggctcctatctccccaccaaaagagagacagggaagcacggggctttaaagctgggcactgggggcagattgcccaagatcccacaaattaaccatgcaaccttgtgtaaacagatcacctcaccgcatgccagttttcttatgaggggaacactagcattataccacacagagatctcagtgaggagccaacaggtggaaaatgtttagcacagtgccaggcacgtaataggtacttggtaagtgtagcctgttagtattactattattgttttagggttattgtttgcacacactttaagctagcaaccccacttccagatatctaacttgaggaaatcaaggatatgcacaaataccttcctgatttttatcacactgtctataatacaaaaaaattaaaagcaaccttgacaaaatacaaggaactgaccatggagagttatggttatctatatgacagacattatatgttgggtttttttcctccataggaccaaaggaaggaaattatgaggtcttcaaagtgatgcaacataactaattaatatggagagatgttcgtaactcttttttgttgttgttaagacagactcttgctctgtcgcccaggctggagtgcagtggcacgatctcggctcactgcaagctccgtctcccgggttcacgccattctcctgcctcagcctcccgagtagctgggactacaggcacccgccaccaagcccggctaattttttgtatttttagtagagacggggttttgccgtgttagccaggatggtctcgatctcctgaccttgtgatctgcccgcctcggcctcccaaagtgctgggattacaggcatgagctactgcacccggccgatgtttgcaactctttaacagtgaaaacaaatcccagcttttataaaatatataagctgggctgggcgcggtggctcacacctgtaatcccagcagtttgggaggccaaggcaggtggatcacttgagctcgggtgttcaagaccagcttggccaacatggtaaaacgctgtctttactaaaaatacaaaaattagccaggtgtggtggcacacacctgtaatcccagctacttgggaggctgaagcacgagaatcacttgaacccgggaggcagaggttgcagtgagccgagattatgccactgcactccactctgggtgaaagagcaagactctgtctcaaaacattaaaaaataaataaataaataagtaaatgaaatacataaactgagcagtgtggctcatgcctgttgtcccagctactcaggaggctgaggcaggagatcacttgagctcagatcaagcctgctgtgggctctgactgcaccactgtactccagcctgggagacagagtgagtttatttatttattaagataacagaggcaaaaatacacagccacggaagaaactgagaccatatatggcaaaatgtttataggggtatgaaatttcttgggtggagaaattatgagtgatttttctctctgctctcctatattttctaagttttctaaaatgcacaaatctcttcagcaattaaaaaataataatttgaggctgggcgcggtggctcacacctataatcccagcactttgggaggccaaggcaggcggatcacctgaggtcaggagttcaagaccagcatggccaacatggtgaaaccctgtctttactaaaaatacaaaattagctaggcatggtggtgcacgcctgtaatcccagctactagggaggctgaggcaggagaatcgcttgaacccgggaggcagaggttgcagtgagccgagatcgcaccactgcactccagcctgggcaacaagagcgaaactctgtctcaaataataataataatgataataatttggccaggcgcagtggctcatgcctgtaatcccagcactttgggaggccgaggcaggcggatcacttgagctcaggagtttgagaccagcctggccaacatgctgaaaccccatctctactaaaaaatacaaaaattagccgggtgtgatggcacctgcctgtaatcccagctactcagaaggctgaggcaggagaatcgtctgaggtggatggaggcagaggttgcagtgagctgagatcgtgccactgcactgcagcctgggcaacggagcagaaactgtctcaaaaaataataataaataataataacattaagaatttgctggtccaaacatggtgagttactgtgatgattcacagttgattacagacctacttacagatctgccttctccccacttcccactactgtatttgattagtctttaaataaataattaacaaataaaaaataatttaatattacccttgggaaataaaaagccatgcttcataaatcttcacaaggtatctaaaaaaaaaaaaaaaaaagccacacagggctcctatggccactgagacaaaaaaaaaaaaaaaaaaaaaagccacagaggcattcagggacacattccaacaggggtgtccccacgtctgcctcctgcagcgggtttccctccctctccccaggccaggctccgcccacagggtgaaagccattccagccatggctggctaagatcctgatagttcagcatccccagtggggacggaaaaggactgtggagtctttggacttatctctcaagccaaacgtgtcacgtgtccccagcccccctccccgagcacactcactgtcggagaagctgccgcccctccttccacaccaacgggctgttctccagggtgaccgattccacggggccattggagactggcgggtgagagaacggaggctgtcttaagtcaggccactgccacctacccatcacctcctccatcttcctcacccctccaacccaaatcggtcactgtcgcaggtcctgtggcatcacttcctgagtgttggaaccctgctctcttcccttactcggggattcctcctccttgaagcgttcctcatctctaggtctcctgactggtggttccccaaactggcccccgacaagataagggtgttatctcaaaaccagaaagctggcctggttctgagagaagggccgactgggttcaagcccagctctgccccatcccagctgtgtgaccctgagttagtgtaagccgtgtcagtttcgtcctctgagaaatgagcttaatgataacagcatctccctcttgggagtgctgagaggatgcaatgagataatttgcttagtattttattcaagtctttcctgggcatctacgctgtgcctggccaggggcctgggctacatgggtaaacaaagacctgcccttgtggaacttccgttctagtgagaggagctggcagcaggtaatgaccatcactatcagctgagcacacaaggtcttctcagcttgcctcggccaagcttccccctcacccagcccgccctcccacatcctctgccctacactgtttgcccaggcacactgaccgactccctgtcccctaaccctttcagcgtgcgtctctgtatctgtgctctctcccctgactctcctgctggggaacggagtcatctttcaaggagcttagactctaagggaccagagggtagagaccatgtctcccgtgctctctgctgtattcctgatctgtgatacaaagcctgtaccctacaaataaagtcttttttggatgaacgattgaacggcaaccctgttcaaacgccacctcctcagtgacgtcttccccggctttcccgcaccgtccccagcactctataaatagccctggcgcccactcctcgcaaagggatcccgtgagctgctcgtgtgtctgcctctgttgcacagggggacccaagcgggactggcccccagggtccagcacgggacctggcagcccatagggagggctctgagagtgagattccgcccctccccagccccggggccgattctgccttctaaggagcaaagtgagaaagaggcaccccatcttcctgcttctccagaacactcagcttctgcgggagggtgccgacagtgcgagcatcagagggtgggtaccttgttctgacacatctgctttcttctccccctggttcaggtctgtcccaaacttcagtttatgatatttggccctaaaagagcaaatgattaatgaataagagatgcgggagagtagacagggtcagtagttacctaaggaatccagaatcccaaaccccaaatcacagggcctcccccagctcgtctactactgaggctgaagcatccccccacacccctggcctggtggaagaaaccactccctggagtcaggcaacctaggttgctctcaggggtccttgaggaaaccatcagcccttgaaaccccagttccttatctgaaacagggctaacaatacccgttaggctattggaaggtataagggataacggaggtaaggactatacgatatttggcgcacagtgggccactagcatcgtgaatatcgttcctggtgtctaacccaaatcccacctactctgtcctgtttctcccctagaatcttatggtactggaatgatggaaaagaatgtcgaccccaaatctcccttagctggaaggaggcgtggctggtggcctcctgacactgtgcttgagacggacccagaaggcaggcccagggcaggatgaaggctcacctttcctgcttcagcgcatactctagcatcttgatccgccgcaccaggtccgtctttagattctcctgccctttcctctctccctgaaggaaggccacctgagcctgggagggcagacaggaggcaaagggagataatggggctcaggctcaatgccggtgtgtctatcactcacccaggtatagtgccagcccacagtcaccccacagtaatgggcagcagccacttcctcaggcacaaagatcccaagccagggttcagggagcactgagaggacaggatggatctgtttccagggccccctgccacgtcacccacaacgagggccgaaggggagcccttaacccctgagataacaatggggccagcctgggcctcacctggtggctgcctttggggggaagtcgggtcagggatggcagtggagaggagggtgggcattcaccgccctggactacccctgacgccctctggcaggtgctgtccctaaggctgctggtggaggtggcgtcccactattcttaccagagcatctgtctctgggaggcgtgggaagctacttctggagcttagggacaagagtgggtggctcggctcggctcctgctccaatagaaaagctttacaagccaagcccgctgtggggaccagccgtcccactgcattccgcccagggtgtgagagaaatgtgccacagacacgaccccgggttcctgccaagcacttcacaccgtctgctggcttgagctgccccgtctgctccagtctgtcaacaggtcatttggagacactgggcccactgccttccaggcaggatcctggcccctgaccatggtccagaagctcttctgccaaagccctggcccaaggctcatctctggcttctccccaagcaccccaccgttccagcccagaacagccagagcccaggcccaacttagacacttactcgctacatgatcttacgcaggtcatcagccttctctgagcctccatttgcccctctagaaaatgagagtcacaagagtgccctcccctcatgtgctaggttctgctcagtcaaggcctggcacagaataaaggctaacaaatgccagcttctacttctttcatcatttttattctccctgtccattgttcgcaacttcgaaatgggcccagttccttacgggaggtaggatcccttggagaccccagatcaactagaaatgtctgtggattggccaggcacagtggctcacgcctgtaatcccagccctttgggaggctgaggtgggcagatgacttgaggtcaggagttcaagaccagcctggccaacatggtgaaaccccatctctactaaaaatacaaaaaacttagccaggcatggtggtacacacctgtagtcccagctactcgggaggctgaggcaggagaatcgcttgaacctgggaagtggagattgcagtgggccaagatcgtgccactgcactccagcctgggcgacagagccagacttcgtctcaaaaaaaaaaagaaatacatgtcaccagttaccttatagaaaagaaaactcatctgtccgcttcaagaatgggaaatttttttcctttttaacactttttaccaacacatatgtatataaacatccaaggccagacagggaaactacttatatgacatcagcatctctgaagcatgagtttctgtcctttgtgtatcttctcagtcccccaaatctactctctgaatcactggagaaggtgtgaggagaggcagaccgaccaccgaagacaagtcctgactttcctcctcactctcctcccttccctcctggggtttggtgattgatccctcaacctcccaggggcagttcagcctgccgggaacctacaccttggtcaatacctgccactgtttggtgactgcccacacacatcaggtgccccagtaaggcgctggggaataacagaggagccatgtggttcctgcacccacagggctcagtcccatgcaggagacaggcatgagcagcaactcacatgcaatgtgactaggaccccattgcgggagcgaaggacgctatgggaagagggacaagaggcgacaattcagctaaggcctgaagctgaagagaagttagccaggggagggaagggccctgctggcagaggacggagacaagagctgcatggtgggcttaaggaactctaaaaaaggccaggatggctgcttcagaacctgtaaaaggctcagtgaagccatggaagggttttaagtacagagaggtaaccgattcgcatgttataaaggcagctccagctaaaacatggagaactgactggagggagttctggagggagactagagggagggagcaggagagcggcagagctggacacagagacccccatcacagatgagggcagtcccagaaatcccaggacagaacggtagtggcttggactaggccggggcagtggacacagtagtggtctatctgtgggggcaggaggtggagttgggcatcccaaccagacctgtcactggctgggttcccccttcatccctctgctgcctcatcgagctgtggtctccctcctcctaatgaggatgtgagggtctcagctgcccactctgctttgctgtccctttcccagtgcctctggaaagagaaccagaaagacatggttggagcatctcagggaggtggaaacccaccaaaaacgggaagcgtcagtggccagtctctccctcgctgcaaacgccagcagcccccacgggctgtctggtctgcgagggccaaggtaggcctgagggtcggtcggggatctggaagtgccgctcaccatatccacccactgccactccctctagccagagccgcagagcatgcgctcccaaaaccttctgatacctggcagctactgcctctccgcccctccagctattcccagcaaggcgacatctaaaggcttcggaggagtcccagcaattcagtcctcccaggagctgatgcctctctgaattcgctgcttcctgtcccagctagctgggaagagtccccgtttcgtgccatctagccctgcatctcctaagggcctccttcccaagcttcagcagctgctggcaggaatgggcccccaggaagctgaagtgggcaggggcagctccgcacattctctgctggcaccgcactcactgcaggtccctgtcgctgctcctatacaaatctccagttcagatccctcattaaaaggtccctcccatcctcaaaaagcttcccctctcagagttgccacagaacaggggcagagccacacaatcaactgtgcatgaacatctacagctctgcggtcccctgcacaaacaagcttcctctgccagcctggaagtttcggatgggcagaaaccacgttacttacttctcagaatcccccacctagcaaatgcctgctcattatcagactgcagctccgccaccttcctgctccaaacttatggtgactactggcaggacctccctgggggctgccttctctgccattcaacacacaggtaccaagcagggtcgcacggcaggtcttctgctaggagcagctgtattaagctcttcagagaaaagttattcagagtccatcaggaaaatctgacactgcctagctcttaagggatctcacaggggaagtcacaccgtctgttagcactaagtgttcaagtaaaggtgtgtaaaagaggtgccgctgatgggagagtaaactggtgggtcaatgtggcagagtcattcactgtttctttttttatttttattttttttgagatggcatctcgctctgtcaccaaggctggagtgcagtggtgtgatctcggctcactgcaacttctgcttcccgggtacaagcgattctcctgcctcagcctcccgagtagctgggactacaggcgcccaccaccacgcccgactaatttctgtatttttagtagaggtggggtttcaccatatcggccacgctggtcttgaactccagaccttgtgatccacctgccttggcctctcaaagtgctgggattacaggcgcgagccaccgcgcccagcccaatcactgtttcataaacacatccattctactattccactcatctgttctgcttcattcttgcacaggaataaggggttctcactgcagccatgtctgatgggggaaaaactagaaaaaatctaaaagtccaccaaccagggtcaaactcaatcagctatggtgcaaacatcccgtgggacgctatgcagctatcaaaaagaaagagttctctgtgctgatatgaaaggaaaaccaaaacagattattatgtcacaaaatgatacatacagcagtagttcatctattacataagcacaataactcttctctctcaggagagaagagcaggaaagggacgaagagaaggaactttcctttttcacttacatatatatgtgtatacacacactcacacacacacacacacccctctgagatgtctgaatttttactaacttaacagaataaaagaaaacaaaagtacaaagtgacagtgctggtaccatgccagacacaagttcctctcaaactccaagaagggtcagtaagtgaggggataaacatcttttctctcatcagcctccaggatgagaagatggtgtggtgggtgctgtgcggtgcactggtgcaaagtcccagaggccaagattcagtccaagctctgctatgactgcttgggtgaccctggggaggccactatgcttgcctgaaccaattttctcaactgtactgggtagcagagaggtacagaacatgggcttaaaagtctaccgacggtcgggcatggtggcttatgcctgtaatcccagcactttgggaggccgaggcaggtggatctcttgaggccaggagttcgaaaccagcctgaccaacgtggcaaaaccccatctctactaaaaatacaaaaatcagccaggcgtggtggtggtgcacacctgtaatcccagctacttgcgaggctgaggcaggagaatcgcttgaacctgggaggcagtggttgcaatgagccaagatcatgccactgcactccaccctgggtgacagagtgagactctgtctcaaaaaaataaaaataaaaataaataaataaataaataaataaacaaaaggtccaccacagaccagcccttctgctcatctgctgggatcctagataaatcaccctctcaaaacctccatttcctctcctgattttttttaaaggtagggggaatatcctttatcctcccagaatgctgcaagaattaaatgacagctcgtatctacagtacttgatacagcgccccagacatggtatgtgctcactaaattgcagctggtaccgttattgctgagtgaggtaatgacactgcctctgcctacatcacagggcattgtgaagatctgatgagatgtatgctgggaaagagcttcggaagtagagagtgggacagaagtgagagcagttacataaggattctgctcccatcccagccccaagcctcagccaccacaagtgagggcagggggagagttactggagggtctttactcatcctatgaacaaaatgcttttttttgagacaggatctcactcttttgcccaggctggagtgcagtggtgcaatcatggctcaccgcagcctcaacctccggggtttaagcaatcctcccacctcagcctcctgagtagctgggactacaggcgcatgtcaccacacccggctaatttttgtacttttttgtagagatgaggtcttgctatgttggccaggctggcctcgaactcctgggctcaagggattctcccacctcaacctccccaagtgttgggattacaggcgtgagccaccgcaccccatccctaccgacacaattctcatcagctatttatttgggtaccagcttcctactagatagcaaacggcaaatcggaaggggaaaggtgggctgctacaagcaggtaatgacaatttctgctaataataacccagtccaagaatcttcagacttccagcgggccattcctgatcccttcaaatccggacatctccatggtcctccagtcactgccaatggacctgacgctccacgaggtcacaaaccctagcccaactcctcagactcttccattcaacatccctgtcccaagctaccccaaaaaccacggggtcttttcccaagacttccacaaacatatccccttccccccaaccccagtctacccccgttccgagatgcctcctcatgttgccttcgggctctacaaaattctcccccctaaagcatcaccccagggtaacccctaactcgtcctcattggcaccatcccaggaccctcacctccatactggacatgcccaacaccccacactccagttcagggctctctacctacatcctacaacacacgtgccatctcagtgccatcgcgcccactcctgcacacccccaaagtggaacttccactcttaagctctcccatccaggctcctagggtacattccctgctctgtccacacttccactccaaagaacccttccctgcactgtgcagccacacatgcccgggatccccaaagtttctcctcagaggggaaggcacacaccttcatcctggaccccttgaaaccctcctcccacccctcgggtccttacacagccctccttccgtgcccaccgtccagtcgccccgaaacacaccgatcccaggttcccgacttcctctccctaaatcctcccggttccccatctggacccgctctttcccagcgggtcccaagttccccccttggacgctcccacctccaacctgcacctggctagggccatggtcggggtcggggtcgggagtccctcggcgcccggcaagcttctgcttactcccacaggagaccactcaggtctcccagacccctccagctcctctccacaccctttcccgagttctcttagcctcccctccagggctcgagtcgcctctctcaggagccccgcggccagcgtgctcagtcccagtcccagtcccactcccagctggttgtggtccctccgcccctttctctcggccggtcccggtgatccctcccacccccggtccctccactcccacctcgggccgtcccggtcccgtcccaccccggagtgccctcaggacacccctcggacggcccctcactcgccctccgggaccgtcgcggtcccctcccgcccccccgccggccgtcccggcggccattgctccaagatggcggcggcggcggcagcgggtgaggccgggccgggccgggccgggttgggggtcgggggtcccgggacagcgctcacctgtaactcggcgcgctcggcctcccagcgggctttctcggcttcgaagcgcgcccactcgtgctggataaagtgcaggatccccggcaggctcaggggctccgggcccgccgtgggcccggggctgcctccgccgccgcctcccttacctgccgggcccggcccgggggcaggggcggagaccggggccgccccagtggggccagggcccgcgcctgagccgagcggacggcaggaggaggcggcggcggcgaccgcggcggccgctcgctcctccatcatggaggccccggggccggcctgcgcgcccgctgtgcctcgcgcgcctgcgcggccgcgccaacacccccccccctcccccgccgcaaccaccgcgcgcgcgcccggcgggggacagtaggaaggggggccggcggcgagcgcgagcctcgcccacccgggtctacaccgaagggtagcgtgcccgcgcgggggccggcgggtgggagatcgcgccccgaggagggcgagggagacccaggccccgcgcgacggtccccctcgctggagtgagactgaggaaggggccgctttctgcccccctcctcccacttcgccccagagaaagagccttaccccttccacacccaaacaccactctcctggacaattacttttactctgagagaaagggcgaccagcagtggccccatcctctctgattgccggccaggttggttgtcatggtaacccttccccagcggtgggggcgaggtggtggggagcagccttcccctcgcttccacctttgtggttatggagccccaaacctcttaggactctgcaccaggagaaggttgctaaggtaacctaagtgtccgtggtggtccttctgctcctatcctcattgattactatggcaacctcccccccacctagcattcaggtagaaaggaccccagccccaaggacactgatctctaagagaagcacctcttccccagcccctcccccatagccacctagttggcattaccatggtaaccgtcttccccttcccatcgtgggaggcccatgcaccaaactaaccaggtgtttttatttagaggagatgctctgctgaggggcagttgctatggttacagggcctggaccttcctccggaaggtgagaaacaggcaagttcaaggcctggttactatgataatagagcagcccccttcgagtgaccctaggaaccaagcccaacaaaggaggggatttttttttttttttttttttttgagacagagtgtaactcttgttgcccaggctgggatgcaatggcccaatctcggctcaccacaacctccgcctccccggttcaagccgttctcctgcctcaccctcccaagtagctgggattacaggcatgcgccaccacgcccggctaattttttttttatttttagtaaagacggggtttctccatgttggtcacgctggtcttgaactcccgacctcaggtgatctgcctcaggcccgcctcggcctcccaaagtgctgggattacaggtgtgagccatcacgcccggccaggggatgttttaagaatgtctctcagaggtagagtgtgtctatggaaggggttgtcatggtaacagcttctgttggcttctagccctaccttttctggacacattcatgctagagggatggttataggttgctataataactgacatccctcccattcaccccaccccactcctgagacaccccaggtggtgcccgagattataggacttcaagagaaaggattccctgacctttctcttgccacttttgtggataagatgaaattgtgctctattgtacggaaatggctgatttgggattttctggttctcctcctctcaggagcgcagctcagctgggctggaactgccctcctggaactcccccagcctacaacctaggaggtaagaagtccctcagtgtcacctacactctcatggaaactgcccttcctcattccttaaggctttcccatgtctctcatttttttctttttctttctttcttttttgagacggagtgtcgctctgttgcccgggctgaaatgcagtggcgcggtcatggctcactgcaacctccacctccctggttcaagcgattctcctgcctcagcctcccgagtagctgggattacaggcacctgccaccacgcccggctaattttttgtatttttaatagagatggggtttcaccttgttggcaggctggtctcgaacttctgacctcgtgatccgcccgcctcggcctcccagaatgctagaattacaggcgtgagccaccgcgcccagccctctcatttttttctaaccgtcacattcccattccacaggtgcagggactgaggctcaggccaaatcgcaactcagacccagtgaacccaaggcctgaagagaatttggattcatttaccttgttttgtggggactggagagacaagtaaactctcagagtaactgtcccctctgactaccatttctaaggcaagccccctgtttctactcttgcgccccctgctggtttcctgccctgtctgtaagttgcatggcttttgtccgtcttttttttgtttgtttgtttgttttgagacagggtctcacccaggctagagtgaagtggagcaatctcggctcactgcaacctccgcctcctgagttcaagtgattctcacacctcagcctccccaatagctgggattacaggtgcgcaccaccatgcccagctaatctttgtattttttggtagagagggggtttcaccatattgcccacgctggtctctaactcctgacctcaggtgatctgaccgcctgggcctcccaaagtactgagattacaggtgtgagccaccacacgtggccctgtcagtcttctttctgtcttctggagggctgacctaatgagtacctcgttcattctgtatcctcaaaacatggggtccaccacaaagaatacttgagtttgttgagttactgagttgaattaatttattaatgtgccatagccaagctttgaaagcccctgtcaggttagggctggggaaggctcactaaagatgggctgagagttggggcttcagaaagaacccaagagagaaggtaaagtttactggtttaaagtacgactctgtagccagcttcttggatcaactcttgggtccactacttcacattgtgtgaccttgaataagagactttaactctttaactctctgtgcctttgtttcctttttttttttttttttttttgagataaggtctcgaggccaggcgcggtggctcacgcctgtaatcccagcactttgggaggctgaggcgggcggatcacgaggtcaggagattgagaccatcctggccaacatagtgaaaccccatctctactaaaaatacaaaaattagccgggcatggtggcgcatgcctgtaatcccagctactcaggaggcggaggcaggggaatcccttgaaccagggagttggaggttgcagcgagccgagattgtgccacagcactctagcctggtgacaaagcgagactccgtctcaaaaaaaaaaaaaaaaaagagtctggctctgtcacccaggctggagtgcagtggcacaatctcaactcactgcaacctctgcctcctagactcaagtaatcctaccacttcagccaccagagtagctgggactacaggtgcacaccaccatgcccggctaattttttaaatttttttgtagagacggggtcttaccagtccatgctggtctcaaactcccaggctcaagcaatctcccccagcctcatcctcccaaagtgctgggattacaggcatgagccaccacatcggctggtttccatttttaaatgtgatcataacacgaggattaaacaagtgaatatgcctaaagtgcttagaacagggcctggcacatggtgagctgctagaattgttattattatcctcccgattcagaaaaatgtagaacattcagaccttcaaaatcatcattgtatccactttgccccaacgaaggggtttgttgcccttagaggcggtgaagtctgcatggctttatcagggtactagatgattcctttccccgcctcaggttccctcacaccctcaccagcaggtggcacctcttcatctggccatcaaatctgctggtgtctggtctgcgagggccaagagttgtgctgggcctgagggtagccaggacctggctgctgtcctctgccctgctgggcacctccttcctggcccagagtcagtcagacagtgtggcaagagccagggcctcagaagcggagacctcggttctcgaccctgcatccttcttatctctctgagccagaggttcctatctttcgtttttgagactgggtctcgctctgtcgcccaggctggagtgcagtggctgaatcacagctcactgcagcctccacctcctgggctcaagggaccctcctgcctcagcctccctcctaagtagctgagaccacaggtaggcaccaccacgcctggctgatttttgtatttttttagagacggggttttgctatattgcccaggctggtgttgaactcctgagctcaagcgatcctcctgcctcagcttcccatagtgctaggattacaggagtgagcccccatacccagcccacgttccttatcttaataattcaagtcactcattcattcaacacgtatttattgagcacctgctatgcaccaagcactgagctgtgctctggggatacagtagggaagaaaacagattccctgccttccatggagattctgacaacaaacaagctaagtaaaatccacgtgataactactaggggagcaaaataaagcaggaatgggggataggaagtacatgggagatgctttttttttttttttaaagacagacaaggtctcgctctattgcccaggctggagtgcagtggcgccatcacagctcactgcacccttgacttccccagctcaagtgatcctcctacctcagcctcctaagtaactgggactacaggtgcaagccatcacatccagttagttttgtttattttttgtagagatggcatcttactatgttgtccaggctgatctgaaactcctggtctcaagcgatctgcctacctcaatctcccaaagtgctggaattacaggtgtgagccactgcacctggccaagatgcatttttttgtttatttacttattttgagacagagttttgttgttgttgcccaggctggagtacaatggcatggtctcagctcactgcagcctctgcctcctgggttcaagcaattctcctgcctcagcctcccaagtagctgggattacaggcgcctgtcaccatgcccagctaacttttttgtatttttttttttttttttttttgagacggagtcttgctctgtcgcccaggccggactgcggactgcagtggcacaatctcggctcactgcaagctccgcttcccgggttcacgccattctcctgcctcagcctcccgagtagctgggactacaggcgcccgccaccgcgcctggctaattttttgtatttttagtagagatggggtttcaccatgttggccaggctggtcttgaactcctgacctcaggcgatctgcccacctcgccctcccaaagtgctgggattacaggcatgagccaccatgcccagcccaccaagatgcatttttaaataggatggccaaaggaagaggttatgggaaggtgacattggagtgatgggggtgggggccggcgcagtggggtggatcgcctgtggctatctgggataagaacactcagacagaggcaacaggcagttctgcagctggagtgtcccaggtgtgtttgaaagatggtgttggtggccaatgttcctagagctgagtgagtgagtaggaaaggatggaagatcacgcggggccttatgggccacattgagtaccttggcttttcctgcgaggtgccagccacagaagggcctgagcagagccaggacaggatgaaatgtgagttgtgacaggatctctcgaggtgctgaatgaggaacagaccacaggaacagaagcgggaagacagtctcttgctgtgaccttcaaggatatgcagactaaccatctcatgtgtgttcggagctcctatgtacctaaactctaagattttgaagggcttgaggttctgtggttgcaaaggttcctgcccctgcactaatgggagctccacaagggcaggaatgttgtctgtctctgagcatctgttgctctctctccagtgcctagaacagtgcctggcatgttgtaggagttcaacaaatagatgttgaaggattgaaggaaggaagaatcaatctaaggtccagaaggcaattccaggattctaaagattagaaaggacatggtgactcacgcctgtaatcctggcactttgggaggccgagacggaaggatcacttgaggtcaggagttcgagaccagcctggacaatatagtgggagccagtctccacaaaaatgtgtttgaaaaattagccaggcacagtattgcatgcctgtagtcccagctactcgggagactgaggcaggaggatggcttgaacacaggaattcgaggctgcagtgagccgtgattgcaccactgcactcaagcttgggcagcagagcaagacgctgtccgtttaaaaaatatatatattttggctgggtgtggtggctcactcctgtaatcccaacatttctggaggccaaggcaggcagatcatgaggtcaagggattgagaccatcctgcccaacatggtgaaaacccgtctctactaaaaatacaaaaattagccgggcatggtggcacgcgcctgtagtcccagctactcaggaggctgaggcaagagaatcgcttgaaccctggaggcggtggttgcagtgagccagtcgcaccaccgcactccagcctggcaacagagtgagactccgtctcaaaaaaaaaaaaattgtttttggctgggcgcggtggctcacgcctgtaatcccagcactttgggaggccacggcgggtggatcacctgaggtcaggagttcgagaccagcctgaccaacatcccgtctctactaaaaatacaaaattagccgggtgtggtggcgcatgcctgtaatcccagctactcaggaggctgaggcaggagaatcgcttgaacgcgggaggcagaggttgcagtgagatgagatagctgccactgcactccagcctgggcaacagagggagactccatctcaaaaaaaaaaaagaaaagaaaagaaataagagcagtttgagaaaatgttcagggtgacttaaacatacaggttggggaaagcatggcaagagatgagggtggaatggggggcagacaaggggaatgtcagaagcagcttccactttctcccctgggcactgggagccatggcaagttcagagcaggggaaggagaggtccaacttgtgctttaggaagactcctctggctatcacggggagaggaattgccaggagaccagggggaggttggatgggaatgtgggtggacctggttgaggagggagctgtggaaatggggaggaggggacagaggatttaggacatagggaggttagttggatgccccctctctctaggaagggcagaaacctacaaaaagccttcatggggaaattatttgatcatctgcttggaacccagagctataccacctgtgctggagaccggccagccaaatcttcagtctcggtggggacaaggagacagcgccatctggtgcttgagggtgtggccaatgaatgtggaggggagtgtcctaaggttggcagcctcttttgatgcaagctaccccagttttttgttgttgttgggtattttgagacagggtctcactcttgtccaggctgagtgcagtggcatgatcatggctcactggctcaagccatccccccacctcagcatcctgagtggctgggaccataggtgagtagcaccacacccagctaattttttattttttgtagagatgaagtctccttatgttactcaggttggtctcgaactcctggactcaagtgatcctcctgccttggcctcccaaattgctgggatcacaggtgtgagtcactgtacctggcccaccccacttttgttttttcttttttttttttaatttttatttatttatttatttatttatttatttattttttgagacagtctcactctgttgcccaggctggagtgcaacggtgccatctcggctcactgtaacctccacctcccaggttcaagtgatcctcttgccttggcctcccaaattgctgagatcacaggcgtgagtcaccatacctggcccaccccacttttgttttgtttttcttgttttaaattggtttgtttatttatttatttatttatttttcgagacggagtctcgctgtgttgcccaggctggagtgcaatggtgccatctccgctcactgcaacctccatctctcaggttcaagcgatttcctgcctcagcctcctgagtagctgggcttacaggcacccgccctcacacccagctaacttttgtatttttagtagagatggggtttcaccgtgttggccaggctggtctcaaactcctgacctcaggtaatccacctgccttgtcctctcaaagtgatgggattacaggcataagccaccgcgcccagcctaacctttttttttcatttatatttttcagcaccccacttaaaattttttttaaattctgattaagtatatataacattaaatgtaccatcttaaccatttttcagcacacagttcagtagtgttaaatgcattcatactgttgtgccaacaaacctctgggaccttttcatcttcccaaactgaaactctgtacttatcaaacaactccccattcccccctgcctgcaacccctggcacccgtcattctactttatgtttctattagtttgactcactctgtttaaaaaaaaaaaaaaaaattctgaggacacccagagttggtgcatggcccagactgggaggtcagggagtgcttcctggagaaggggaagtcaaagctgaaaccaaatagggaaaagaaagggaattgagaaagagctgtagaaaggggcaaggctgagggtggcagaagggggtggttctgacaatcagctgctgccttccctttcgtccccctcccccaggatgccccggaggcccagctagccccagacttcggccccatgcggctcacccgctgccaggctgccctggcggccgccatcaccctcaaccttctggtcctcttctatgtctcgtggctgcagcaccagcctaggaattcccgggcccgggggccccgtcgtgcctctgctgccggcccccgtgtcaccgtcctggtgcgggagttcgaggcatttgacaacgcggtgcccgagctggtagactccttcctgcagcaagacccagcccagcccgtggtggtggcagccgacacgctcccctacccgcccctggccctgccccgcatccccaacgtgcgtctggcgctgctccagcccgccctggaccggccagccgcagcctcgcgcccggagacctacgtggccaccgagtttgtggccctagtacctgatggggcgcgggctgaggcacctggcctgctggagcgcatggtggaggcgctccgcgcaggaagcgcacgtctggtggccgccccggttgccacggccaaccctgccaggtgcctggccctgaacgtcagcctgcgagagtggaccgcccgctatggcgcagcccccgccgcgccccgctgcgacgccctggacggagatgctgtggtgctcctgcgcgcccgcgacctcttcaacctctcggcgcccctggcccggccggtgggcaccagcctctttctgcagaccgcccttcgcggctgggcggtgcagctgctggacttgaccttcgccgcggcgcgccagcccccgctggccacggcccacgcgcgctggaaggctgagcgcgagggacgcgctcggcgggcggcgctgctccgcgcgctgggcatccgcctagtgagctgggaaggcgggcggctggagtggttcggctgcaacaaggagaccacgcgctgcttcggaaccgtggtgggcgacacgcccgcctacctctacgaggagcgctggacgcccccctgctgcctgcgcgcgctgcgcgagaccgcccgctatgtggtgggcgtgctggaggctgcgggcgtgcgctactggctcgagggcggctcactgctgggggccgcccgccacggggacatcatcccatgggactacgacgtggacctgggcatctacttggaggacgtgggcaactgcgagcagctgcggggggcagaggccggctcggtggtggatgagcgcggcttcgtatgggagaaggcggtcgagggcgactttttccgcgtgcagtacagcgaaagcaaccacttgcacgtggacctgtggcccttctacccccgcaatggcgtcatgaccaaggacacgtggctggaccaccggcaggatgtggagtttcccgagcacttcctgcagccgctggtgcccctgccctttgccggcttcgtggcgcaggcgcctaacaactaccgccgcttcctggagctcaagttcgggcccggggtcatcgagaacccccagtaccccaacccggcactgctgagtctgacgggaagcggctgaagccctgataacctcgcctttgtttttcgggggtctgtctggatgtggagaagctctgtgtgagcggtgaggggtggagggatgtcgcggagaggggaagggggaaactgaccaagaaagaaattctaaggagagcatgagagaaggctggcattggcaggaggagagcaccaggacgaggatgggaagcgacctccagatttatcaaatggtcatgcccactgggagccgtggatatgcgtggggacatcctgggtcatctcagtcatggagggagacggggatgtcacgccgtcccgcagggcccagcacagccccagacccgaaaaaagtgttctgcccaagattccgagagccctgcgctctagggcaggggcagagttttggaaacagtgcaggctctggagccagactggcgagattcaaatcctggctctatcgcttcggagccaggtgggcctgggggggcgtcgcagtctctctgtgcctcagttgcttccaggatgcgggacccttggctgcaggggttgcttccgccactagagggcgcgccggtcccgctcctggtggcccactgtggctgcccgggcgacagtacgcccagggcctgtgttccatagccatctactctcttgagcctttggacttctctccaagcccctgtgggaggcggacagcagtgaccacctccccttcttttggactgcgacctccttccctcctgggagagccctgtgacctgcatgctactcttaactgttctattcaagactgaatagaagtatttcagtcttgcagaggaggaaatgctcagagctccgaggtgcggctgtggtcgagaaccgggtgctgggccgggcgcgggggctcacgcctgtaatcccagcactttgggaggccgaggtgggaggatcgcttgagcccaggagtctgagaccagcctcggcaacatgccaagaccccgtctctatttttaaaaaagaaaaagaaccgacttctgaatcgcagctccactcatgactaatacctcattatttcagctgtctgcacctaattccccacttgcacggcagtgtagacaataaccatagctcacactcactgagcacctactgggtaccaggcaccattctcagtgtttcacctggatcaactaatgcgtccctcacctcagccctctgaagtgacagctgctattattttcattacacagatgaaaaagctgaggccagaatcgtgaagtcacttgctcaaggtcaggcagcttaggaaggggcagatcgggggcttgaacccaggtggtcaggctctggagcccacaattgtcttacccactatgcccctctctagtcatggtccccaagaggggcttggagacccacttagcaggtgaaagcaatggcagccttccttatttgattatgcacctaagaataaatggtatttgggcatgtattcccaatatgtgtatatttatttataaatatatacagatactattatctgtatgttagtaataaagcttaaattattccattttaaaattatgaatatgaatagggttttttttatgtttcttgcctcatcccaatgacttttgcacacccaggtgtgagcacccagcattcaagaccacgggttaaaaaaaaaaaaaaaaagctggccgggcgtggtggctcacgcctgtgatcccaacacttttgggaggctgagacaggaggaacacttgagctcgggagttcgagaccagcctgagcaatagagcaagactcttgtcaattaaaaataataaataaagccaggcatggtggctcacgcctataatcccaacactttgggagcccaaggcggacggatcacaaggtcaagagatcgagaccatcctggctaacacagtgaaactccgtctctactaaaaatacaaaaaattagctggacatggtggcgggcacctgtagtcccagctactcaggaggctgaggcaggagaatggcatgaacccgggaggcggagcttgcagtgagccaagattgtgccaccgccctccagcctgagcaacagagcaagactccatctcaaaaaaataaaataataaataagaggcaaaatgttaaaaataagcaaggactgggcacagtggctcatgcctgtaatcccggtactttcggaagccaaaattggaggatcctttaaggccaagagttcaagatcagcctgggcaacatagcgagatcccctgtctctacaaaataataaaaaaatagccactgttttagtcccttctcatgctactaataaagacctacctgagactgggtaatttataaaggaggaaaggtttaatcgacccacagttcagcacggctggggaggcctcatgaaacttacaatcatggcagaaggggaagcaaacacatcttgtgatggcaggaagaagaagttccaagcaaaaggggaaagttccttataaaaccattagatctcatgagaactcactatcacgagaatagcatgggggtaactgcccccatgattcaattacctcgcacccagtccctcccacgacacatggggattatcagaactacaattcgagatgagatttgggtggaaacacagccaaaccatatcagccaggcataatggcatgcacctgtagtcctagctactggggaggctgaggcaggaggattgcttaagcctaggagatcaagactgcagtgagctctgattgcacctctgcactccagcctcggcaacagagcattatcccatccccccacaaaaaaaaagaaaaaaagaaaagacatgggcttgaggttggagaggaccgggtttcccagtgctgccaccttctcccagggcctctattgactctgtctctgcgcccccaccttgcatttgggaagtggaagcaatgagatcgctcctcccacaggagtgtgttcgcggtaaaggggcccagagtctggctgggtttgaatcctggcttggccacttggtttctttgtactctcagacaagtcgctgcctctctgaacctgtaaactggggagattggtaatatttcacaattgtacattcctgggaggaggaggcttcatagaccagcaagagaagattactgtttggccgagtctcctgaggctcagacatccaaagcctgacttcttgtaacccaacccctgcttttaaccactgaacccaaaaatggttcacaaagagacttggcaggtccacagggaggattctggaatgcatggggatgatttgcattatcatcatgactggaagctgctcttggctcttggcagacgtggtccagggatgcagatgtcttgtaatattcaggaatctccacacagtacagcatcatcccttgtctcatgcagcttccagatgtctcattggacattcacgaaggaagggtaatattcaaaatgttttgccactggtactgtaatataaattagtatatgtcaatgtatgcatcaaatttttaaaatattttaggccaggcatagtgtaatcccagcaccttgggaggccaagacaggaggatggcttgaagccaggaattcgagaccagcctgggcaacatagagagaccctcatctctacaaaacatttcaaaaattgagcagggcgtggtggtttacaccattaatcccagcactttggaaggccgaggcaggtgaattgcttgagcccaggagttcaagaccagactaggggccaggcggggtggctcatgcctgtaatcccaccactttgggaggctgaggcgggcagatcacttgaagccaggagttcaagaccagcctggccaacaaggcaaaaccatgtctctactaaaaatacagcaattagctgggcgtggtggtgcacccctgcagtcccagctactcaggatgctgaggtgggaggatcacctgagcccaggaggtcaaggctacagtgagccatgatcatgtcactgcattccagcttgggcaacagagtgagaccctgtctcaaaaaaacaaaaatccttattatcacctaagttatgatatgacaaagatctgtcacaattaacttgaactaattcatttttattcaaatatgtattgaatttcagtgctttctcaactactcttgtactattattatccagtcagaagtatttcagtattttaacaaccagtattggccaagtatggtgactcacgcctgtaatcctagcactttgggaggccgaggtgggtggatcacaaggtcaggagttcaagaccagcctggccaatatggtgaaaccctgtctctactaaaaatacaaaaactagccgggcatggtggtgggcgcctgtagtcccagctactcaggaggctgaggcaggagaatcgcttgaacccaggaggcggaggttgcagtgagccaagatcatgccactgcactccagcctgggtgacagagcgagactctgtctcaaaaacaaacaagaaagaacagtatttccatactagttcagaccaactaaattttagccttacttggaggtgaaaaccctggccaaaaatctctctcttgtacgtacaaagtcctttttgtttttaaatagcctcggaatcttccaggaagtgcaactaccacaaaaaatgagggaagcttgtatcgtgttttgttcaaaacttggccaaaggttgtccaccatgtgaaaaaactcacattgcacatggctcttggtaattggacaccagtccacgtgttttcaatgtgttggaactgtctatattacaggcataaacatctgcctacctccttgggttctaggggactggctccacacatccgcataatgaaatgcttattgtaagttactatgttcttatttctcctttttattacatttagggcaatcaaggatcgtttttgttgctgctgctgttgttgttgtttctgagacagggtctcactctgtcacccaggctgcagtgcagtggcacagtcttggctcactgcagcctcaacttcccaggctcaggcgattctcccacctcagcctcccgagtagctgggactacagataagtactaccacacccagcttttatatatatatatatataaatatatttatatatataatgtctctactaaaaatacaaaaattagctaggtgcggtgtcgcacgcctgtaatgccagcagtttgggaggccaaggcggatggattacttgaggtcaggagttcgagaccagcctggccaacatggtgaaaccccatctctactaaaaatacgtgtgtgtgtgtgtgtgtgtgtgtgtgtgtgtgtattttaagtagagatggggtttcaccatgttgctcaggctggtctcaaattcctggactcgagtgatctgcccaccttggcctcccaaagtaggattttcttaaatcatgttaaatcatgtgccagtgggttatactgtctatgaacttcatttcaggagaacagagagaactttcccagaactgacattcaagccagcacacgccctggtatggccacgccagtggttaagacagcaaaacactaaattatggattatttactcattcataaacggtcactgccatgaaccccctgactattagtatcctcctagctctccctggggatcccctgggctgccctctggcccagaagtccaggggttaaactgggtatagtgggagataagagggacccatatcccggatgttggatggactgatgactttgccaagcagtaaatattttgtctatcagccctacatgttacaaaatatttgctatgaacaatagtggcatgtaaagacctgtctacattagccaggtgtggtggctaatgcctgtaatcccaacgctttggaagaccaaggctggaggatcacatgagcccaggaggtggaggccacccagggtaatatgttgagaccctgtctctaccaaaaaaatttaggaggggcgagtggctcatgcctgtaatcccagcactttgggaggctgaggcgggcagatcacttgaggtcaggagtttgagaccagcccagtcaacatggtgaaaccacgtctctactaaaaatacaaaaattagccaggtgtggcggctcacacctgtaatcccagcactttgggaggccgaagagggcggattacttgaggtcaggagttcaagaccagcctgaacaacatggtgaaaccccatccctactaaaaatacaaaaattagccgggcgtgatggtgggtgcctgtaatcccagctactcaggaagctgaggcaggagaattgcttgaacctgggaggtggaggttgcagtgagccgagattgcaccactgcactccagcctgggcaacagagcaagattctgtctcaaaaataaaataaggtaaataaaaaataaaaaacctgtctacaaatgcacctttatgcacaatagccccaacctggaaaccatcagatgtaaatcaacaggtgggtggataagcaaactgtggtacactcagacaacataatactccttagcaagttttttaaaaaaggaaagaactgggccggacgtggtggctcacgcctgtaatcccagcactttgggaggtcgaggcgggccgatcacctgaggtcgggagttcaagaccagcctgaccaacatggcaaaaccctgtctctactaaaaatacaaaattagctgggcatggtggcacatgcctgtaatcccagccacttgggaggccaaggcaggagaatcacttgaactcgggaggcggaggttgtagtgagccgagattgtgccattgcactccagtctgggcaacaagagtgaaactccatctcaaaaaaaaaaaaagaaaagaaaagaaagaacaaactactgatacatgcaaaaataagaataaatcccaaaagcattatgacacataaaaaaaagccagatgcaagacgctacatagtatatgattccaccaatgtaaaattctagaagaggtaaaactaattcatagtgaccaaaagcagatcagtggttaccggggcctggagctggagagaggggcagactgcaaagaagcatgaggaaatttggggatgatgagaatatcatgtatcttgattatgggagtggtttttcacagtatattcatctgtcaaaactcatttaactgtattttatttatttatttatttattttgagacagggtctcgcagcattgctcaggctggtctcaaactcctgggctcaagcgatccttctgcctcggcctctcaaagtgctggaattacaggcatgagcctggcctaattgattttaacgggtgcaatttatcatatgaaacaatttttttggagccagccttgctctgttgcccaggctagagtgcagtggtgcagtcttggctcactgcaacctctaccttctggattcaagtgattctcatgcctcagccacctgagtagctgggattacaggtgtgcacaaccacacctggttaatttttgtatttttagtggagatggagtttcaccatgttggccaggctggtcttgaactcctggcctcaaatgatttgccttgacctcccaaagtgctaggattacaggtgtgagccaccttgcccggcctattgtatgtaaattatacctcaataaagttgacctcaaaaagagcagatgggggcagaatccaacaggcctaagaacattgacctgtctctaagagagacaaaactgagtcactgccctctgcctttctgtccccatactgccactctgagcctagaacccaggaccaaccctaatccggggccagcctgggccctccttcctgggccaagctccttcaaagaggcaagaggggtgggtggggcaatggagaaagggagagaaaggtgggagctgggaactgggacccagggagtgaccgtcaaagtgccttttcttctgctcttacgtaacctgcactagcagcctttgggtgaggcataagagagccattgtcaccggcgggtgagacctggcagtgctcatccaaggtcacatagttgccaggcagcagagtcgagactgaaccagcctcttccaccattccacgagtgtttattgagctcctgctatacgcatgcaccggaccctatgctagactctgagcctacagcagtgaacaattcaaagatggttcccccacagagtgaccttcccagtggggacaggcaggaaacaataaacatcataaaccagtgaattctatcgtctgttgggaggggactgttgctattaaaaaaggagaacagggcagggcacggtggttcacaactataatcccagcactttgggaggcgtaggtgggaggatcctttcagcccaggagttcaaaaccagcctggacaacatacagagactgtgtcgctacaaaaaacaaaaattaagaaaaaaaaatagctgggcagggtagcatgggcctatagtcccagctacttaggaggctgaggtgggagtgtcacttgagcctgggaggtcaaagctgaaatgagctgtgatcatgaaactgcattccagcctgggcaacagagcaagaccctgtctttaaaaaaaaaaaaaaaaagtagagcaggcctggcgtggtggcttatgcctgtaatcccagtactttgggaggccgaggtgggaggattgcttgagctcaggagtatgagcctggccagcctgggccatagagcaagaccccatctctgtttgtttgtttgtttgtttgtttgtttgtgacagggtctatctctgtctcccaggctggagtgcagtggcgcgatcttggctcactgcaacctctgcctcccgggttcaacaattctcatgcctcagcctcccgagtagctgggataacaggcgcccgccactacacccagctaatctttgtatttttagtagagacaggtttttgccacatctctcgaactcctgacagcgagtgatccacctgtctcggtctcctaaagagctgggattacaggcgtgtaccacgacacctggctaatttttgtatttgtagtagagacagggtttcgccatgttggccaggccggtcttgaactcctggcatcaagtgatctgcctgcctcagcctccctaagtgcacagattacaggcatgagccactgcgtctgcccaagaccccatctcttaataaaaaaaaaaaaaaaaaaaaaaaaaaagaggaaaagggctgggcgtggtggctcacgcctgtaatcccagaactttgggaggcctgaggtgggcagatcacgaggtcaggagatcgagactatcctggctaacatggtgaaacccccgtctctactaaaaatacaaaaaaaaaaaaaaaaaaagccgggtgtggtggcgggcgcctgtagtcccagctactcgggaggctgaggcaggagaatggcgtgaacccgggaggcggagcttgcaatgagccgagatcgtgccactgcactccagcctgggcgacagagcgagactccgtctcagaaaaaaaaaaaaaaagagaaaagggtagaatagggtatgggttgggtgggtgagggtgggggcaggaagcaggggtggtagaattaaataaagcggtcagagaaggctcactgaggtgacattgcagccaagtcgagagggaggtgtgggaagagccaaatggaaatctggggggcagagcagccaagagaggaacagcctgtgcaaaggccctgaggcaccagcaggcctggcatgttcaaggaatggcagaggctggagtaagagagggaggaggagagtgggaagaggtgaggtcggtgaagtaaggcgcatcctacagaggctatggggagcaccttggatttttctctgggttctgagctgcggagggccacgagctgccatgatggaaacaggcgccctctggaggccatatggggaacagacggaagaggttggggctcaggagtcccggcgtgaaggcaattgcaatagttcaggtgggagatgatggcagctggccagggtggtacccagtgtggaaggtgtagaggggccagatttggggtttgagggcagagaaactgagatttctggtagcttgaatgtgggatatgacgggcagaaggagggcgtagcaggggaaggaaataaagtggcttgttctgtatgtgactggagcccagctccttgcaccaacccgggctcctgcacccctcagcaggcccagggatccccaccgccaggccggagccaaccccatggaacccaaagtgctcaagctccccagtgaatgaggctcttaatgtatcaccgcccgtcaggcctggcctggcatccgggtttctccacctgcggggtgcaggggccacattggtgggttccagattccaagttccagtatttggaggaggtggcagaggagggcccccaccccaccgttttcatctttcacccaagatttgcacaggtttcattttaatgacagtccactgtctgtttgttagttagctttgagatagagtctcactctgttgcccaggctggagtgcggtggcaagatctcagctcactgcaacctccgcctcctgggctcaagcgattctcccacctcaggctcctgagtagctgaaactacaaatgtccagataattttttacatttttagtagagacggggttccactatgttggccaagctggtctcaaactactaacctgagatgatccacctgcttcggcctcccaaagtgctgggattacaggcatgagccactgcgcccagccacccagccactggttttaaaaaatgtttgacactgggcacagtggctcatgcctgtaatcccagcaccttgggaggctgaggtgggtggatcacctgaggtcaggagttggagaccatcctggccaacatggtgaaaccccatctctactaaaaaaaaaaatacaaaaattagccgggcgtggtggcaggcacctgtaatcccagctattcgggaggctgaggcaggagaatcgcttgaacccgggaagtggaggttgcagtgagctgagatcacatcattgcactccagcctgggggacaagagcgagacttcatctcaaaaaaaaaaaaaaaaaaaaagcagtggctgggtgcagtggtgcatgcctgtaatcccaacactttggcctgggagttccagaccagcctgggcaacatagtgagatcccttgtttacaaaacaaaacaaaacaaaaacaaaaaccttttctaattaaaaatagctgggcatggccaggcacagtggtggctcactcctgtaatcccagcactttgggaggctgaggcaaatcacctgcggtcgggatttcgggaccagcctggccaacatgacaaaaccccgtctctacaaaaaatacaaaaattagccaggcctggtggcaggtgcctgtgtggggaaaagaaaaagagagatcagactgttactgtgtctatgtagaaaagcaagatataagaaactccattttgatctgtactaagaaaaaattgtttctgctttgagatgctgttaacctgtaactttagccacaaccctgtgctcacagaaacatgtgctgtaaggaatcaaagtttaatggatttagggctgtgcaggatgtgccttgttaacaatatgtttgcaggcagtatgcttggtaaaagtcatcgccattctccattctctattaaccaggggcacaatgcactgcagaaagccgcagggacgtctgcccaagaaagcctgggtattgtccagggtttcccccgactgagacagcctgggatatggcctcatgggaagggaaagacctgactgtccctcagcctgacacctgtaaagggtctgtgctgaggaggagtagtgagagagggaggcctctttgcagttgagataagaggaaggcttctgtctcctgctcgtccctgggaatggaatgtctcgatgtaaagctgaccattcccattcgttctattctgagctaggacaaaacctccctgtggctggaggcgagatatgctggcagcaatactgctctgttgccctttgctacactgagatgtttgggtaaagagaaacataaatctagcctactgcacatccaggcacagtacctttccttgaacttactcatgatacagattcctttgctcacatgtttccctgctgaccttctcctcacctgttgccctgctacactcccctcgctaagatagtaaaaataatgatcaataaatactgagggaactcagaggctggcgccagtacaggtcctccgtatgctgagcgccggtcccctgggcccactgttctctctctatactttgtctctgtgtcttatttcttttctcagtctctcgtcccacctgacgagaaatacccataggtgtggaggggctggtccccttcatgcctgtaatcccagttaccgaggaggctgaggcaggaggattgcttgaatctgggaggcagagattgcagtgagctgagatcatgccactgcactccaccctggggacagagtaagattctgtcttaaaaaaaaaatagctgggcatggtggtgcatgcctgtggtcctagctactcgggaggctgaggtgggaggatcgattgagctcaggagtctgaggctacagtgagacataatcacaccactacattccagcctgcgagacagagcaaggtctcaaatctttaaaaatattttttttttttagaaaaagtttgagccaggcgcaatggttcacacttgtaatcccaacagtttcggaggctgaggcaggcgaatcacctgaggtcgggagttcaagcccaggctggccaacatagtgaaaccccatctctactaaaaatacaaaaacttagctgggcatgttggcacacacctgtaatcccagctacttgggaggctgagacaggagaattgcttgaacctgggaggtggaggttgcagtgagctgagattgtgccattgcactccagcctgggcaatagagcaagactgtcacacacacaaaaaaaatagaatagaaaaaaaatgagtaagtaacgtttggtaaagcttgtttcatgaacatgtttttctttatacacataggttgtttatgaaatatgtaggtaggtttatagctccataaacaggcatccctcagaatataaacctaatctattcccaaaaaagtagtatatagaaactttggggataaaccactatttatttatttatttatttttttgagacgaagtttcgctcctgtttcccaggctggagtataatggcatgatctcagctcactgcagcctctgtctcccgggttcaagcgattctcatgcctcagcctaccaagtagctgagattacacgtgcacggcactaacccagataatttttgtatttttagtagaaacagggttttaccacgttggccaggctggcctcaaattcgtgactccaggtgatccatccgcttcacctcccaaagtgctgggattacaggaatgagccacctgcccagctttaatttatttctttatttgagacggagtgttgctctgtcgccaggctggagtgcagtggcgtgatctcggctcactgcaacctccacttcccaggttcaattgattcttctgcctcagcctcctgagtagctgggactacaggcgctttccactacgcccggctgatttttgtatttttacatccatgttggccaggatggtctccatctcttgacattgtgatccacccgcctcagcctcccaaagtgctgggattacaggcatgagccactgcacccagccccggcttttattttaagcagagaaaataatgcactcccagcttcatccaaaaacgctaaacaatttcctagaatatcaataaaagactcttaaacacctacataacagcctaccacggattatggcatagtagaaagcatttaaaataccaattgcctaattattcaacacttaaactcatgaatgattatgtttgtgtacaatacaaaagtattctgcacagaatcagatataaattatattttccttccgcagtgcaatgatcatggggtataactaaacaaacaaacaaacaaaaagatactaaagataccgtctataattggacccaggtcagtggtgcctccaggcacctggccaaagtcaacacagggggtttggaagcggaagataatatcaacaatggctaacacattcaacgcacaaaacagaatcctgttagaacaggtgagaagtagggctgggtgcagtggctcagacctgtaattctagcactttgggaagccaaagtgggaggatcacttgagtccaggagtttgagaccagtctgggcaacatagtgagaccccgtctctacaaataaaaattagcggccgggcgtggtggctcatgcctgtaatcccagcactttgggaggccaaagcaggcagatcacctgaggtcgggagtttgaggccagcctgaccaacatggagaaatcctgtgtctactaaaaatacaaaattagcctggcatggtggctcatgcctgtaattccagctactcaggagggtgaggcaggagaatcacttgaacccgggaggcagaggttgcggtgagccaagatcgcgccattgcactccagcctgggtgacaagagcaaaactccgtctcaaaataatgataataataataataatatttagttgggtgtggtggtgtgcacctgtagttccagccactcaggatgctgaggcaggaaaactgctaaggtccgggaagttgaggctgcagtaagccatgatagcaccactgcactcagcttgagcaacagagaccctgtctcaaaagaacaggtgagatacaacagcagcatagtacttttttctggggggggggcggtgagacagagtctcactctatcgcccaggctggagtgcagtggcatgatttccagtcactgcaacctctgcctcccgggttcaagcgattctcctgcctcagcctcccaagtagctaggattacaggtgcccaccaccacacccagctaatttttgtatttttagtagagatgaggtttccccatatgggtcaggctggtctcgaacccctgacctcaggtgacctacccgcctcagtctcccaaagtgctcggattataggtgtgagccaccgcgcccggccagcatagtccatattctgaacttacacaggatgtaaaacagttgcagagtgggtttttatccaaatagctattttggggtttcaaggaaataaaataattcttgggacaatttggatagtgagagttgggatatgaagggatgctgcattcctaagtaggtggtcacaaaggaaaataaattgttaccatgcgttgtgcagatttttgttgttgttgctcttgagagagtcttgctctgttgcccaggttcgagtgcagtggcgcaatcttggctcactgcaacctccacttcttgggttcaagcgattctccttgtgcagatttttttaagagatagggtctcaatctgttgctcaggctggagtgcagtcacataatcatagctcactgcagccttgaacccttgagctcaagtgattctctcgccgcctcagcctcttgagtagtggaaactccagatacgtaccaaccaccacacccagattgtagaaaaaatttaactggaaggcacacagggcaaaatgcatgtgatttgtgtacaggttcgttaactttcccaaatgcatccatctgtggaatcatcacccaaatcaaggtaagatatttgctttatcatagaaggttcttttgtgctcccttctgatcaatatgctattttttttttcttttgagatggagtcttgctctgtcacccaggctggagtgcagtggcacaatctcggctcactgcaagctccgccccctgggttcaccacattctcctgcctcagcctccagagtagctaggattacaggcgcccgccaccatgccctgctaattttttgtatttttagtagagatggggtttcaccatattagccaggatggtctcgatctcctgacctcatgatccgcccacctcggcctcccaaagtgctaggattacaggcatgaagccaccgtgcctggccccatattcattctcaaaggtcaccactgttctgatttcccaccataggccagttgagcatgttctagccctcctctaaatggaactatacagtatttaccgtctctggcttctttatctcaacaaattatctgaaatgcatttctgttgcagtgtaggtcgatatcgctcttatttattgctgagtaatcttccattgtatgaatgtaccagtgtatccaattgatttgttcccaaattttggcaatgatgagtacagcagctaaacgtttgtggacacatttttgtaaaagcaaaagttttcacttctcttgggtaaatacccaggagtgcaactcctaagctgcatagtaaataaatatatattatatatatatatatttttttttttttttgagacagagttttgcttttgtcacccagactggagtgcaatggtgagatcttggctcactgcaacattctgcctcctgggttcaagcgattctcctgcctcagcctcccaagtagctgggactacaggcatgtgccaccacgcccggctaatttttgtatttttagtggagacggggtttcaccatgttggccaggctggtctcgaactcctgacctcaggtgatccatccacctcggcctcccaaagtgttgggattacaggcgtgagccactgcacccagcctgtattttttaactttattaagaaactgcccagttattttccaaaacaactcagccatctactaagggagcaccaaccaagagatgaggagtcctgttgtatcccatcctcccttggtcttgtattcagccattctactgtgtatagtggtgtctcattgtggtttcccgtggtgtttaagagacagggtctggctgggcgtggtggctcacgcctgtaataccagcactttgggaggccaaggtgggtggatcacttgaggcaccggtctctactaaaaatacaaaaattagctgggcatggtggcagatacctgtagtcccagctacttcggaggctgaggcaggagaatcgcttgaacctgggaggcggaggttgcagtgagccaagatcgtgccactgcactgcactccagcccagacaacagagccagactccgtttcaaaaaaaaaaaaaaaaaaaagcgacagggtctcactctgttgcccaggctggagtgcagtggcatgatcatgggtcactgcatccttaaactcctgggctcaaggaatcctccccaccgcagacttctgagtagctgggactgcaggtgtgcaccactgcacctgcctaattttttgtgttgtttttgagacagagttttgctctttcacccgggctagagtgcagtggtgcgatctcggctcactgcaacctctgcctcccgggttcaagcaattctcctacctcagcctcctgagtagctgggactacaggcgcccaccaccatgtctggctaatttttatatttttagtagagacagggtttcaccatgttggccaggctgatcttgaactcctgacctcgtgattcgcccgcctcggcctcccaaagtgctgggattacaggtgtgagccaccgtgctcggccttaatttttgtatttttttgtagagacgatgtctcactatgttgcccaggcttgtcttgaactcctggcctggagtgatctcaaagtgctgggattacaggtgtgagcccccatgcccagcccagtggtgtttcttgatgagcagatactgtcattgcagtggccagtgctttaagtcaaattctcaagaacacctgattaaatagttgacactcaattttattgctaaaaaaaatgtcctctggagtgacagcaggtatttgtcctcagcctctccccagagtccctgggagtgtttctgttattgtggagggaataggggatctggggacagggtgggacgtaccatggggacaggaggtcacagaacacacacacacacacacacacacacacacacacacacgtgcacacacacatccccccacaactacagccgccaaaataaccagcatggtgttgtaacatccccccagtgggggctagaattccccatggtgacctgtgacctgctccctgagacaggggaggccaggcaggtcacggtggggacgcagcagaacattatttctccatcttgctgttttctagccttgagttggggacatgagtgagaactgggggttttgaggagtaacccttgtgaacacatgtactccagcagccaggcatcccagatctcctgtcctggagggtgctggggcccctggctccccagagtgtgcaggcagacccccagagccctagctcatccatttatccattcctcataatccagtgtccaaagagcacccccagcagggcagggaaggtccctcccggggtttacatgactgattccttctcagaggcgaccgtggcatcccctgcgggcccccgatagtgtttgaggagggggtttccttcctcagtggggactggcagcggatccaggggcagctcactcttcacttgtatcaactcaggctctgtgcttctcgactccgtacggtccacgtaattttggaggagtcctgcccccagagcgtcaccttctacattgaggacggtacaggaccggtcgctaaaggggtagaaatgacagcaaagtaagcgggaggggagagggtgagagggaaggaaagggccaaggcctaagcctcctgcctctctccccctggaatctaaaaagtaaaaattaagagttggagtcagcctgggcaacatagtgagatcccatctttatatatatttaaaaaaaaaaaaaattagccaggcatggtagtgcacacctatagtcccagctactcaggaggctggggcaggaggatcgctggagcctgggaggtggaggctgcagtgatcacaaccatgatcacatcactacactccagcctgggtgacagagccagactgtgtctcgaaaaaaaattataattcacctaccataaaattaaccttttaaaagtgtccatcttggtattttttagtatattcagacttgtgcaaccattgccaataattaattccagaatttttttttttttttttttttgagacaggatctcactctgttgcccaggctggagtgcagtggcacaatctcggctcactgcaacctccacctcccaagttcaagcgattctcctgcctcagcctcctgagtagctgagatcacaggacaggcgtacaccaccatacccggctaatttttttgtatttttagtggagatggggtttcaccatgttggtcaggcttgtctcaaactcctaacctcaaataatccacctgcctgggcctcccaaaatgttgggattacaggtgtgagccaccgtgcctggctgctttccaatctttatactcttaatagcttaatcgtgatagcaaataattatgtagcaattactgcttactgggggctgctctaagggaggtgtgtctgttatctaatccttagggagagactgttcttctccccgttttacagatggagaaactgagacgcaggaagattaagcacttcccgaggtcacaacagtgaatgttggagctgggatgtgaacctgagcagtctggctgaagagtctgctgtattcaccacacagacgctctacttttctgacatccctcttagagccacaaagatgccattccttgccctcaggaatgctcaaggttccccccatttcctccagaattccttccttcttctcttcctcttctgtccagaggctctaaggactctcactcactcatcctctttcccaggggtacccctggccctgccccagtctccagacccacactcacactagccagtccacagccaggatcaaggagatatggtcgaccgggaggttgactgcttcgaggatgatggccagagtgaggacacctccagcagggatgcccgctgcccccacgctggacgctgtggccgtgaccctgagggagaaggtgggaggttaggcagatgcctgtcttgtgggagaagatgggggtcaacaggggtccgggggtcccatccgcagccccctgacactcacaggatggtgatgatctttacgaagtccaaggactgctggctgagctgtgcaatgaacactgcggccacgcactggaagagcgcggcaccgtccatgttgacggtggcgccgatgggcaggatgaaacggctgatgtgcttggccacgccattattctcctccacgcacttcatcatcagcggcagcgtggcggaactgcaagggatgggggagctgagttaggttaacctgctgaccggggctccgcccaccctccaggtccagcccaggtgaggcctcgcctaccccaccccaaccagccaaagccccacccaccccacccagtggatccccaccagagcctgcctaagcaaagccctgtcacccaaccaccctccaggtctgacctgcaccacccacccagttgaagccccgcccacccagagcccacccacaccacctgcccagccaaagccccgcccacccagatcccgcccataccacttgcccagccaaagccccgcccaccagatcctgcccataccacctgcccagccgaagtcccacccacgtccccagtctgtcccttggcccaaggcccccacatctaacctagaccccccttccctcctaccatgtcctgactccacccccagccctcacttgctatatctaagctcttttcccacaagcaggcagcactagggaactcaataccaggattacaaaatccatgagtcctggaacccctgggagagtatagactactacctcccaaaatacccacacaattcacacctaaattctactgtctgggtcctgctgactctcaccaataatacactaagaattactattgtcttgggaggggacagggccagcagggatgaatgaaatgcccaggagagacggtggaaggagttctgaggttgaatcagagcagaacttaagagccccccaggggcatggcagctcacacctataatcccagcacttttggaggccaaggtgggcggatcacttgaggccaggagtttgagaccagcctggccaacatggcgaaaccccgtctctactaaaaacacaaaaattagctgggtatggtgggggacacttgcagtcccagctactcgggaggctgaggcagagaatcacttgaacccaggaggcagaggttgcagtgagctgagatcacaccactacactccagcctgggcaacagagcgagacgccattgtttaaaacaaaagaaaaaaaagagtgcctccagggccacggggaggcagtgtaagaaagagggaaataaatctctagggcaatcatttcctatctttttaagggtggggataaatccaggaccttatgagaatctcctgaagtatggcccctgtacccagatacaatgtcccgggcagagaaaatttcatccgctccatgccgcttagcggattaaacatcccaccctagcccaccccaaggccgtacctggaagaggtcccaaaggcagtggccagcggcgtcacgatgccccacaggaagcggtaggggtttttgcgggtgaagaggaagtagatgaggggcagtaccaggagcccatggatggcgtgacccagcaggcagcacagaatgtacttgccaaggcgggcaaagagtaaacccacatcctccatctccacgatcttgccagccaccaggaacatgatgcccacaggggcgtacctgatcagtaacacaggagacagcttgttgcctcttccacgggcccagtggccaggcgtgaggctcagcaccctacccacatcttcctgccttcctgaggtcaggagaagccccagcaatgtgtgcttcagcatgggcaccactcccaggcctggcccctgaagcccccatgccaatctcatgctctctttcccctcaaaggtagagcagcccggagataaaactctccgtgcaggccgggcacggtggctcatgcctgtaatcccagcactttgggaggctgaggtgggtggatcacctgaggtcgggagttcaagaccagcctgaccaacatggagaaaccccgtctctactaaaaatacaaaattaaccaggcgtggtggcgcatgcctgcaatcccagctacttgggaggctcaggcaggagaattgcttgaatcagggaggcagaggttgctgtgagccaagatcatgccattgcactccagcctgggcaacaagagtgaaactccatctcaaaaaaaaaaaaaaaaaaaaagtctcagtgcttccatcaccatgtgaagcagtcaccagatttggacttcacatgggagacagaaagaaatgtccatcaaggtgcgccattcacacttcctgggttggtttgctatggcagctagcatgacttgagccaatacgctctctgcagatgatgaaagataaagaggctgggcacagtggctcatgcctataatcccagcactttaggaggtgaaagcaggaggattacttgaggccaggagttctcgagaccagcttgggcaacacagcgagacccagtctctacaaaaaataaaaataggccaggcacggtggctcatacctgtaatcccagcatgcagggaggtgaaggcagacagatcgcttgagcccaggagttcaagaccagcctgggcaacatgtctctctttttttttttttgagatggagtctcactctgttgcccaggctggagtgcagtggcatgatctcggctcactgcaccctccgcctcccaggttcaagcgattctcctgcctcagcctcccaagtagctgggactataggcgcgtgctaccacgcccagctaattttttgtatttttagtagagacagggtttttctgtgttagccaggatggtctcgatctcctgacctcgtgatctgcctgcctcagcctcccaaagtgctgggattataggcatgagcctccgtactgggccacccagtttcttaaacaacaacaacaaaaaaaatgagctaggctttgtggctggggtctgtagtcccagccacttaggaggttgaggtgggaggatcacctgaacccaggaggtccgggctgcagtgagctgtgatcatgccacactgcactccaacctaggcaacagagcgagatcctagttcaaaaaacgtttttttaaattactattattattattatttagacagtctcgttctgttgcccaggctggagtgtactgttgcaatcttggctcactacaacctttgcctcccaggttcaagcgattttcatgcctcagcctcctgagtagtagctaggattaaaggtgtacaccaccattcccagctaatatttgtatttttttgtagagagggtttttcgccatgttgaccaggctagtctctaactcctggcctcaagcaatcctcccccctcagcctcccaaagtgctgggattacaggtgtgaggtaccacaaccagccaaaacacacatttttaaaataaaaatttgaaggccaggagcggtggctcacacctgtaatcccagcactttgggaggccgaagagggcggatcgcttgaggtcaggagtttgagaccagcctggccaacatggcaaaaccctgtctctactaaaaatacaaaaattagctgggtatggtggttcgtgcctttggtcccagctgctcaggaggctgaggcaggagaatcacttgaacatgggaggcagacattgcagtgagctgagactgtgccactgcacctccagcctgggcgacagagcaagactctgtctctaaataaataaataaataaaataaatacaaattttagaaagaccatggcctgggtcttaataacaactcccaggtatgaagcatttgcgatgtgctctgcccttgaacatgatgttgaatcttcccagcaacccccggagggaggtcctatgagtcagattgcagattacacaacacccaatagattcctcacgggaatgctgggaggatgcaatgagatgccagttgaaaggagctaaagctttttacagacaataagtgatctgtaaacttcaggtgggtttattatcaccctctcctgctgtgaagatcccagggatggctccaagccaagaggactcccaagtccgggcgcggtggctcacgcctgtaatcccagcacttcgggaggccgaggtgggcggatcacctgaggtcgggagtttgagaccagcctgaccaacatggagaaaccccgtctctactaaaaatacaaaattagccgggcatggtggcgcatgcctgtaatcccagctactcgggagactgaagcaggagaatctcttgaacccgggaggcggagtttgcagtgagctgagatcacgtcattgcactccagcctgggcaacaagaacgaaactccatctcaaaaaaataaaataaaataaaagcctcccaacatcacttccctagactactcgatcatcggtcgcccatccatcatcactgactagttatctccccagtcccttcttgtaagtcacagaagaaaggcatattttcccagccacttgtgcagagaagggaggctagatacccaagttctggccagtgggaagtatccagaagttatacaagcaaaaagcccaataaatattagctactaggatttactgtaggcacgcaataagccaggcactgtcctaagaccttccgtgtaccgtattcactttcttttcttttcttcttgagacagagtttccctctgtcgcccaggcagtggcatgatctccgcttactgcaacttccgcctcccaggcttaagtgattctcatacctcaggttcccgagtaactgggattacaggtgcgtgtccccatgcctggctaattttttcgtatttttagtagagatggggtttcaccatgttggccaggctggttttgaactcctgatctcaagtgatccacccacctcctcccaaagtgccgttcccattttatagatgaggaaactgaagcagagaaggaaaatcacttgcctaaaatcacatagacagggaatggtcaatgctggatttaaatgcaggtcatctggctccaaagagtgaatagagggtgccccatcccaaacagaatgccccgcacctgcctctggcagcagaccgaccctccaaccccacccacccccagcctcctctcccaccacctaccacatgatccaggagaccagaaccatggtggcctcattgaaggagttgaagaagcggataagcagctccccttcaggccccagcttccgcagcgccacaccaaagacgatggcaaacactaccaagcccaggatgttcatcccctccacctcctgccccacgggcacctgtgggcaaggaacagatcggggtggaaaggacactcagtctacctgcacagtcactgagggcctgtccttggcaccactgggacccagcagagacaaggcagccctcagaccccttcctcccaaggctcccagtccaggtccaggggaaatatattagtcgtcagggatggcccagagtaggtggggctggaataagggagtccaggggagtgtgggaaccaagagagggcagtgccagcttggggagtagggggcagtcaggggggacttcctggaggaaggagcatctgagctgagacctggaggacaagaggagtgaaccaggtaaagaagggtggtagaaagatctacagagaggaagcagaatgtgcaacagcctagaaatgagtgcaacttgggcattcaaagaagagccataatctactgtggctagagtagaataatctgggcagggtcactagttaaggatgggcagccaggcgggctggcaggggtttgacctcacagggagcccttggtcatagactgtagcaaggagactggactttctcctgaaggcactgaggcacatggcagggctctgggtactgcagagatagggtcacatttgtgttttgaaaagatcctcgggcggagcacggtggctcacgcctgtaatcacagcactttgggaggctaaggtgggcagatcacctgaggtggggagttccagaccacactgaccaacatggagaaaccccatctctactaaaaatacaaaattagccgggcatggtggcacatgcctgtaatcccagctactcaggaggctgaggcaagagaataatcacttgaacccgggaggcggaggttgcagtgaaccgagatcacgccattgcattccagcctggacaacaagtacaaaattctgtctcaaaaaaaaaaaaaaaaaagaaagaaagaaaagaaaagatactcagggccaggagcagtgcctcacgcctgtaatcccagcactttgcgaggcggccaaggtgggcagatcacttgagcccgagagtgcaagaccagcctgggcaacatggcaaaactcagtctctataaaagatacagaaattagccaggtgtgttatagtcacagctactgggaaggctgaggtgagaaggatcacttgagcccaggaggtggagactgcagtgagctgtgatcgtgccaccgtactccagcctgaatgatggagagagatcctgtgtcagaaaaacaacaacaaaaacctctggctggctgccagtttgagcaggttgagggtggatggaagggggcagggagagggcagcatggaatggggttggggggtgagggagaaaggaagagcctgggcacctggggtgggaaaagaggggacaaagtagagacctatccagaaggcagaaaagacagaaattggggaaggactgcagagtgtcaatcaaattccacagcaaagactaaggcagaaataaaaccaaaaaattatagcaataggcaaagaggtagagcccccgctgcctcccactgctctcaccttcaccctggttccggtgatattcctctcttcataggtggtagagtactgtaggtggggttgggaagagtcagtgtccatcgttaccagggcctcccaaccccatgccaagctaacaatgctcaaagcctgcccttccacatcctttcaatgtgatctcatttcatctgctggcaaccccatggggcaggatgatcaatacccccattttccagaggtggaaaaccgaggctcagagaggtaaacacatttacccagagtcacacagctagaattaaaactcacaggaggctctgagcccgtattctcattgacatgcatttttccaggaactaaccaaaatcaggtagcaagggctccccctggctggcatccctccctgtccacccccatcccctcaggacacccctgaggactcactgagcgaaaggctgctgacaccaggttggaagggaagatatttctgcagagacagacacacagagggttattagataccatagtgggagggcagcattgtctgagaggctgggttggcgttttaaggcagcgagtggaagctttgggggcccgcctgcacgcaaatacagcccctactcatgcctcagcccggcagggttggaactaggcttgcacccctttgcaggacttggggagtcagcctccttcagccccaagaggctggcgtgctagccctgaggcattgtgggttcggggtgaggaatgctggcctcccacggcaggccagggcaggtcgccccgggcctcagctccaccccatgcagcaaacttaataccctggacagcttgcatcagccacttcctcctggagggcctgccagcggctctgagagtatgggggaggatctgggtgtgttgggaggcggtggcggggagggagaaaagggacggcttcatatctcatgaatatgcatctgtgtttacaaggctacccttactcttgtgtgacagtgtctgccttaagatgaaaatagtagctaaggccaaggcgccatggctcttgcctggaatcccagcactttgggaggccaaggcagacagatcgcttgagccaggagttgaagaccaacctgggcaacatgacgaaaccgtgtctctacaaaaaatacaaaaattagccaggcatggtggcatgtgcctgtagttccagctactctggaggctgaggtgggaggatcactcaagcccgaggaggttgaggctgcagtgaaccaagatcaagccactgcattccagcctgggaccgagtgagactctctcaaaaaatatatatagcagctaagccatctacagcacctaccgtgtggcaggcaggcattttggcctgtgcttgacacaaattaacccatttcatcctcacgacagccttggggataatcactattaccccattttacagaaaaggaagctgaggcccagaagggtaaagaaaattgcccagctgggaaatagcagagctgggatttgaacccagccagctggctccatagccccaagcactccacatgctccctctcaccaatgactggtgtacagccaacgccatgtgcccatatacaatctgtcaaatgttaatagtttgggtgcaggttaaggttcagtagtatgggacagtgtccatggatggccacccatgcatcacggtacagtaaaataacgtcatggtagaggaatgagtttggccgggtgcggtggctcacgccagtaattccagccttttgggaggctgaggtgggcagataacttgaggtcaggggttcgagaccagcctggccaacatggcaaaaccccgtctctactaaaaacacaaaaattatccaggcgtggtggcacacggaaggctgaggcacgagaatcacttaaatccaggaggtagaggttgcaatgagccaagatcgcaccactgcactccagcctgagcaacagagactgtctcaaaaaaaaaaaaaaaaagcatgagtttattggtgtgtgaccacataggtgtgtatgtgagtgtgtattgtgtgctcttgagcctgtgtttagatgttggcgtggctggtggcatcactgaatggctgtgctacaggggtcttagtacacagtgagcgtgtgtatgaccgctggtatctggccatgtgtttgtcgagatgctacagcctcagctgagtgtctgcgtgaatgtgtccagctgtatgtcatttggttataagcctgtgtggcaggccaagtgtgagctacagctgttttggcacgcaggggaggcctgtgctcataaacagcctcggagtgggtgtgcctgcctgaaggtccgcctgtaccacccaggcccaggctgggccaggacccagctaatctcccccagccagaaggtgctcccaggcttcaactcgggacaccaagcctgccccagtctcgcatctcagcctgcactgacgccccagaggctggagaaccctgttccgtgactcatcatttccttcccccaacttccaggaagtccccaacgtggagacactgaatgagcaagccctaaaggcaagcgcaagggggcctctgccccccgccctcctcaaagtgggggaggccattcttgggggcgcggggcagaggccaggagaaggaaaagaatctgctcccctttctaactggtcctcttctgggctgcctgctagggggtggcccagacagaggaggaaacgggagggaaaggcaggggtggcagggctgatctaaaagataaaggggaagcggccagaccccagctgaaatgggcgggaagcggaggccaaaaacagagcctggttatgtccgagtgacacgtggtgtgggggtgccccagggctgggaagagggcctggtgggagttactcagatctcagatcctccaggggctccttacccaaactctccaaccctggccccaaattatatctagaagccccatcttggggcccttgaccacgcaaagattccccccgcaaaagttcctcctggggtcccctcccctcagtgtctttctcccctaggcagaccctcctatgtctccccaaatcactttcttctccctctataagaccccacttatgtacccaggcccccagatttagaaaccccttccccaggagactagactcacactcccgagggctggagcctcccctcaatatcctgtcgagttttcctaagactctagagggaagtctctgctccaggggccccaaagccccgtcctgtccacgtgaccactcccgccatccgtaacactcttccccacctcccgggggagcgggagctgacctcgcaagatccaggaacgaatcgagcacctccttgctgggggcattttcggcactgcccgcggctcccacggaggcgttgatggcggcggaggcggcgcccggctgcagagccagcgccaagcccactccgagcgccgacgccagcagcgtggtgaccaggaaaaagagcagcgcccaggcgcccagacggccgagcgcgccggggtccaggctggcggcgccgccgatcaagctgcacaccaccagcggcaagatgatcatccgcagcagacgcagcagcagctcgcccgggaagacgaaggcgctcaagcgctccgggcccaacgccagcgcacccccggcccccgacacccccagtcccagcgccacgccggccaccacggccaccactgtcagcagcacaagcaggttggctcgaaggcagcggcgcacctggtcccgggaaccgcagtagccgcctgctgccgcgccttggtcctcgatggaggccagcgccaggcccccgttggcggtgggctccgccgctgcgagccccttggagtctcgaggaggatcggccaccatgatgggaagcaccggggtttcttagcgcctggaagctggctgggagcgcttgggctccttcccaggacccgacgttcctaggactgagttgagtaacagcacctggagactggaactttggagggctccttagagttgtgagttcacagcactgaagttccttggctcttggaagctggagtgtttaaattccccaggctgggcgctgaggcttctctgctctgccccgtgtgccagatgtccgaaagctgggagttcggagcgcccgggttccttggccctaggagctgggaatacgagagtttctctgggtgggacgtggggcccttggctccaggaggttgagtgcccccagatggcggaggtctgcaggaggctaggttctggtggcgcagatcccggacgcctggatccgggaggcggggacccgggctgcctgggtcttggacactgagggctgggatgccagaatctgggggccgggaagcggacctccggaaacaggggacccaggctcttaggtccgggagggtgggatgcgggcccctgtgtacggaaggcggtggtctggtgtccgggagtagcggttaccagccagagaaagcctcccgggcgtgccgcgtggctctgagcccgtttagcggaagctgccagggataagggtagggggcggggcttgagaaggcggggaccgaccctcgggcgccgattggctgcagagcgttcggagactggacgagtaggggcggggctgatacccgagatgggccaggtcccccatagaaggcagattaataatacccatctccaggagccgggcccagagacgacggggcggggccaggaaggggcggggccttgggagggtgctgtttcccgccaaaggaactgggttgtgggttggagcccttaaaccacaggggttcgttccctggtgcgagggtcgctagaaagctccggtggtcctcggtgattcatttgcaactcaactcagctttggaactcctcagccctgagtttggtctttagtcgcctctgagaactttaattcctcgaatataaagtgcaggtgttaaaagcttttgtctcatatgattgctgtaagatttaaataaaattgatgtatttatttagggagccgtggctcaagcctgtaatcccaccactttgggaggtgaagcgggcggatcacttgaggtcaggaggtcgagaccagcctggccaacatggtgaaacccgtctctactaaaaatacaaaaattacctggtgtggtggcacgtgcctgtaatcccagctactggaagcctgaggcaggagaatcgcttgaaccccagaggcagaggaagtcattcaccttgaggccacacctagagaggatgacacgtgcatgcccacctcccaagcccctaaccgcacccactctgctgcctccccaaattctctgttagtggccgtttgggaggttaacaatgaattatgattccttactccacctgacagtgttgaaatcctcattcctttcccatctctagcctgttctgtgacatttcaggctttcatgcttgctcaaagattgtagtggtaatgtcagaagcttcctcctacagcagctgtgaggcctcaggtaatttacaacctctatgaggctcagtcttcatatgtgtaaatgggaataataataagtcataccgccttgagtgttgcaagggttcaaatgagataatacggccgggcgcagtggctcacgcctgttatcccaccactttgggagttgatgcgggcagatcacttgaggtcaggagttccagacgagcctggccaacatggcaaaaccctgtctctgctgaaaatgcaaaaattagctgggtgtggtggcacatgcctgtaatcccagctactcaggaggctgaggcagaagaattgcttgaatccaggaggcagaggttgcgaagagccgagatctcaccactgcactccagcctgggtgacagagtgagactccacctcaaaaaaaaaaaagttatttatttgtgctttaaaattttttgttctttctctcttcttttgtttctaacaaaaatgcccttcagaagaaagtcaaatactactgctgcgattgctgttattgttattattactgaagaacaagctggattcagtggcatgcacctgtagtcccaggtatttgggaggctaaagcaggaggatcccttgaggccaggagttcaaggctgcagtgagctatgatcgtgcccacatttagccactagactccatccggggcaacatagtgagaccttatctttaaaaacatgaaaataggccaggcatggtggctcatgtctgtaatctcagcactttgggaggccagagtgggcagatcatgaggtcaggagatcgagaccatcctggccaatatggtgaaactctgtctctactaaaaatacaaaaattagttgggcatggtggcatgcacttgtagtcccagctactcaggaggctgaggcaggagaatcgcttgaacccgggaggtggaggttgcagtgagccaagatcacacctctgcactccagcctagtgacagagtgagactccgtctcaaaataaataaataaatattttaaaaaatttttcggccgggcatggtggctcacgcctgtaatcccagcactttgggaggccgaggcgggtggatcacaaggtcaggagatcgagaccatcctggctaacacggtgaaaccccgtctctactaaaaatacaaaaaatcagccaggcatgatggcgggcgcctgtagtcccagctactcgggaggctgaggcaggagaatggtgtgaacccgggaggcggagcttgcagtgagccgagatcacgccactgcactccagcctgggcgacagagcgagactccgtctcaaaaaaaaaaaaaaaaaaaatttcacagtggcttacacccttaatcccagcactttgggaggccaaggtgggaggctcacttgagcccaggaatttgagaccagcctgggcaacatggcgagactccgtctctacaaaaaaattaaaaaataagctgagtgtggtggtatgcgccaatagtcccagctacttaggagggtgaggcgggaggatcgcttgagccaggaggtcaaggctacagtgagctgtaatctcaccactgcactccagcttaggtgacagagcaagactcagtctaaagggaaaaaagatttaggctgggagcggtggctcacgcctgtaatcccatcactatgggaggccaaggcaggtggatcacttgaggtcaggagttcaagaccagcctggccaacatggtgaaaccccatctctactaaaaatacaaaaacatgaaaataggccaggcacagtgtctcatgcctgtaatcccagcactttgggaggcctaagtgggcagatcatgaggtcaggagatggagaccatcctggccaatatggtgaaaccctgtctctactaaaaatacaaaaattagttgggcgtggtggcgggcggctgtagtcccagctacttgggaggctgaggcaggagaactgcttgaacccaggcgtcagaggttgcagtgagcggagatcacaccactgcactccagcctgggcaacagagtgagactctgtatcaaaaaaaaaaacaaaaaaacaaaaaattccttggctgctagagcttgcattctagtgcagagagacaagacaataaacttgggcttggccgggtgcagtggcttacacctgtaatcccagcagtttgggaggccgaggcgggcggatcacttgaggtcaggagttcaaaaccagcctggccgacatggtgaaaccccatctctactaaaaatactaaaaaattagccgggtgtggtggtccacgcctgtaatcccagatactcgggaggctgaggcaggagaatcgcttgaacctgggaggcagaagttgcagtgagctgagatctcaccattgcactccagcctgggcaacagagccagactctgtatcacacacacacacacacacacacacacacacacaaaatccttggctgctagagcgtgcattctagtgcggaagagacaagacaataaacttgggctgtcagctggaactaagcgttgggagaaagcaaaagcatcctatgagtgacagagtgaacagttcagccactggaaggaagtgacatctgcactgagatctgaaagataagaaggagcccatggcataatgtggaaacattcaaaggacgcgtgtgaagccctgaggcaacagagaggtttccatctctgttagcagtgctcacagacatggttttatccccactaatccaggagaccagctcacactcccattttcctgatttggaagcagataagggtaatgaggcttgctgtggcccaaaccccaggcataagcaagaaatctgaactcagatgtttctgatccttgtctgcatctcctatcagacaccctggctacccctgcactcggctgtctccaactagacatttccttcaagggacagtcatgtattctgagcccagtgttgggtcctgcgatgggtgataccagggacccagtggcgaacaagacagttctggccccgttctgctgggactcaaagttcagggggggacacagatagtgatgatacagagtgggcagggctgggatgggggagcccagaagggatgcttgaccaggcttgggggtcagggagagcttcctggaggaggaggcatcggagctgggatatgaaggagttggaccaatcccagggaaagaatattccagacaaagagaatagcacatgcaaaatcccagacttctggccaggcatggtggctcacgcctgtaatcccagcactttgggagactaatgcgggtagattgctggagaccaggaattccagaccagcctggccaacatggcaaaaccctgtctcttctgaaaataaaaagtaaaaaaaatagccaggactaatggcacacgcctgtaatcccagctattctggaggctgaggcaggagaatcacttgaacccagaaggcagaggttacggtgagccaagattgcaccactgcactccagcctgggcaataaagcaagactctgtctaaaaaaaaaaaaaaaaaaaaaatcccagacttcagaagagtctggaatatttcaaagcacagatctaactgggccacccctactctctgaacagccccagtggcctccctcaggatgaaaaccactcttcagctaggcatctgtccgcttggtgattcatttattcattcattcaacaaaccacatccacagaatagaagactgagagacatcaaatagaaggagacggatgcccatgagctgacatgggatcgttgtgatgactcatctggccaatatttatcaaacactgagaaaaacagatgaggagccgggagcagtggctcactcctggaatcccagcactttggaaggttgaggtgggtggatctctcaaggccaggaattcaaaaccagcctggccaacatggtgaaacctcatctcaactaaaaatacaaaaattagcggggcgtggtgctacctacccgtaatcccagctactcgagtggctgagacaggagaatcacttgaacctaagaggcagaggttgcagtgaaccaagattgcaccactgcactccagcctgggcgacaaagcatgaaaagaaaaaaaggcaaagaaaaacagatgagaaaaacacgagcaaaacagatgaaaatcccttctctgctagcactgatattctagcagcaggacacggtcaataaatactaaacataatatgcatgtaggctaagtgggttatctggcttgtaacttattgtcacaaagcagaaagtgctgtggagggaaatatatatgtatgtatgcatgcattaggaaaagtgaggaattagatgaatgaagggtaaattgcaataataaatcaggctgggatcagtggttcacaactataattcgaacacttttggaggccaaggcaggaggatcacttgagctctggagttcaaggttatagtgagctgtgatcgtgccactgctgcactccagcctagggaacacagtgagaccttgtctctaaaaaaataaaaattaggtggtcacaaaagtatagagggaggccaggcacagtggcgcacacacttgtaatcccagcaacctgggaagctgaggcaggaggatcgcttaagctcaagagttcgaggctaggcacaatggctcatgcctgtaatcccagcactttgggaggccgaggtgggtggatcatttgaggtcaggagttcaagaccagcctggccaacatggtgaaaccccacctccactaaaaacacaaaaattagctgggcatggtggtgggtacctgtaatcccagctactcaggaggctgaggcaagagaatcacttgaacccagaggacggtattgcaccactgcactccagcctagacgacagagtgaggctccatctcaaaaaaaaaaaaaaaaaaaaaaaaaaaagagtttgagaccagcctgggcaacatttcgaaagctcatctctatgaaagaatacaaaaattaaccgggcgtggtgatgcacgtctgtggtcccagctactcaggaggatgaggtgggaggatcacttgagactgggaggttgaggctgcagtgagcagagattgcaccactgcactccagcctgggtgacagagggacaccctgtctcaaaaaaaaaaaaaaaatagaaaggggaaaatcaaggtgcgagaaagtgtgtatagaatggggaaaagcaaatgaacacagcatctgttttattttttaatttttttaatcttttatttttattttattttatttatttatttatttttgagacagagtctcaccctgtcacccaggctggagtgcaatggcgtgatctcagctcactgcaacctctgtctcccaggttcaagcgattctcctgcctcagcctcccaagtagctgggactacaggcgtgtgccaccatatccggctaatttttgtatttttagtagagacggggtttcaccgtgttggccaggatggtctcgatctcctgaccttgtgatctgcccacctcagccacccaaagtgctgggattacaggcgtgagccactgcacccagcaaattttttatttctatttatttatttttttgagacagagtctcactctgtcgcccaggctggagtgcaatggcacaatcttgcctcactgcaacctccacctcctgggttcaagtgattttcctgcctcagcctcaagagtagctgggattacaggcacccgccaccagacccagctaattttttttgtatttttagtagagatggggtttcaccatgttggtcaggctggtcacaaactcctgacctcaggtgatccacccacctcagcctcccaaagtgctgggattacaggtgtgagccaccgcgcccagccaacagcatctcttttaaatgcattgactattcaagaatttgcagaaactgctaaaaggatttgctttcaggaaggaaagctgtggctttacagttcggtgccgggaccctgaaatctgtcatcttgaccttggatctcacttagcagctgaaagatcttgggcaaatcattcaactctcctgtctcagtttgccgggctgtgcagtggggatcactgtagcttctgccttggagatcacggaggggtgagcagagttcatgtgtatggagtgctttggttggtgcccggcaaatcacaaccccatggtattttaagttatgacgactttttgcagataaatattataaagaacggaaaagaaagaaagatttcttctaggctgagtgcggtagctcacacctgtaatcccaccacgttgggaggtcaagacaggtggatagttcaagtccaggagttcgagaccagcctgggtaacatgacaaaaccccgtctctacccccaaatatacaaaaattagccgggcgtggtgacgcaggcccgtagtcccacctattctggaggctgtagtgagaagatcgcctgagcctaggaggtggatgttgcagtgagctgagatcgtgccactgcactccagcgtgggagacagagtgagaccccatctccgaaaaataaaataaaagagaaaagaaaagagatcgcttccagtgcataccccgggcacagattcacaagctgggagcttttcccctgaggacccagggaccactggacaaagggaggcctgagaggcccctgagggacccagcagctggtgaccgggctgcggtgtggaagctctggcagccctccaggtaatcagcgccccagggtttggacaagaggcccaggccagttgggcaacttgagcacaggccaggctcagcctagtcactgcccacccactctagggctagaggtgccagacagggggatgttggagggaggaggctccaggactcaggagaccccagaatcctagacccttcagggaatgtggggtgggtctaagccaagagggcatggtttgagggtttggatgatgttgcctggaacgcctcacaccctgccctcccgcttcttagagaggaaaatataccagctggtctcagccggctttcctccccctaagccaaacctcctacccagattctgatttcatcattggaaaaaaaaaaaaaaaaaaaaaaaaaaaaggcctggggctccaggaagggggtgagagagaccaggaagaggctggatcccacagagcagagaggccctttctggcctcagtttgccacctaggaaatggctttaggtcttgtcttgtattgtcttgtcttttttctcttttcttttcttttcttgaaacagttttgctctctcgcccagccaggagttcagtggcgcaatcatagctcactgcagcctcaaactcctgggttcaggctatcctcctgcttcagcctcctgagtagctaggactataggcacacgcaaacatgcctggctaatttcttaaatttttttgtaggggccgggagcggtggctcacgcctgtaatcccagcactttgggagtccaaggcgggcggatcacgaggccaggagatcgagaccatcctggctaacacggtgaaaccccgtctctactaaaaatacaaaaaattagccaggcgtggtggcgggcgtctgaagtcccagctactcgggaagctgaggcaggagaatggcgtgaacccaggaggaggagcttgcagtgagctgagatcgcgccactgcactccagcctgggcgacagagcgagactccctctcaaataaataaataaataaataaataaataaataaataaataaaaacagtaggacagaggaagcaatcagatatgcattagtcttaaatgagcagagggatgactttctacctgtgaagacgagctatcagtttatgtgaccagggtgaaattcaacagaactgttttagggtaaaaatcttgaggctcacaaggaatttccttgtgggcaaattgtgagggagatatgtagcttttttttttttttaatctttgtagctatcttatttagggataaaatgggaggcagatttgtctgacatagttcccagcttaacttttcccttggcttagcgattttggggacagacccaagatttattttcctttcacataagaaaaaaaagcaggccaggcacagtgcctcatccctgtaatcccagcactttgggaggccaaggcaggtggatcacctgaggtcaggagttcaagaccagcctggccaatatggtgaaaccccatctctactaaaaatacaaaaattactcaggctgtggtggtgcatgcctataatcccagctatttgggagactgaggcaggagaattgcttgaacacaggaggcagagattgcagtgagtcaagatcatgccactgcactccagcactccagcctaagtgacagagcaagatcctgttaaaaaaaaaaaaaaaaaaaaagattcctggactgctagaatctgcatttaataaataccccaggaggttgtgggaggcttaaaattacatgggtttattctctgaaaagtccagagattccagcctggacaacatagcaaaaccctgtctctacaaaaatgcgaaacttagccaggcatggtggctcatgcttgtagtcccacctaattgggagtctgaagcaggaggatcatttgagcccaggaggcagaggctgcagtgagccaagatcacatcatggcactccagcctgggtgacagagcaataccctctcttaaaaaaaaaaaaaaaaatccagagagtgaagttcgaaatggtttcactgggctgaaaccaaagcgttagcagggccacgctctgttaggaggctctagaggagaatctacatccttgccttctccagcttctcgaggtcatctgtgttcctcggctcatggccttttcctccatcttcaaaaccagcagcatagaatcttcaaatctctctgcttccatcatcccactgccttcattctcttctatgtcaaatatccttctgcccctctcttataagggcactcgggattaatttacggcccacccagttaggccaggatcatctctccatctcaagatcttttattgactcacatctgccaagtctctgttgtcatttaaagtaatattcacaggttctagggaccaggatatctttgaggtttattaggcagccaaccacaggagccatgcatggatacagggtatgtaaattcatgggactggttggagattcactaggaagtgagtatagtagggccaaagaaaacaatgggttcaatatgaaaggctgaaaagacaagaaaacctagctacttgggaggctgaggcaggaggattgcttgaacccaggagatcaaggctgcaatgagctatgattgggccactgcactctagcctgggcagtgtagtgagaccccatgtctacaaaaacattaaaaaaatagataggtgtggtggcatgcaactataatcctacctactcaggaggcaggggcaggaggatcacctgagcccaggagatcgaggctgcagtgaggtacgattgtgccactgaacttcagtcttaacacacacacacaccagagtgcattgtaaaagtaattattattttgtgaaatttttgcttaatttatatacatatttgcacacatactgcattccaggtaaaatatacatctagctagggtgtggtagcttgcacccaagtccctgctagtgagaggctgaggtgggaagactccttgagcctaggagttcagaccagcctgggcaacacagcaagtccccatctctaaattaaattccttgagctcagaaattggaggctgcagtgatctcaccactgcattccagcctgggcaacagagcgagaccccatctctaaaaataaaataaatatgctaggcacggtggttcacacctgtaatcccagcactttgggaggccaaagctggcagatcacttgaggtcaagagttcgagaccagcctggccaacatggtgaaaccccatttctactatgaatacaaaaattagccgagtgtggtggcagtcccctgaaatcccagctactcgggaggctgaagcaggagaatcacttgaacccgcgaggcggaggttgcagtgagctgagatcacaccactgtactctagtctgggcgacagaacgagactctgtctcaaataaataaataaataaatagataaaataaataatcataaaataaatacatgaaatgtatacatcctgttgtggatcaggtgtctctagttcaaaattacttgagaaacactggtgtgccaagccttctgtggtccatgagtctcaccacgtcactcctttcctcacacatttttttttttttttgagagggagtcttgctctgtcgcccaggctggagtacaggggcgcgatctcggctcactgcaagctccgcctgccaagttcaagcgattctcctgcctcagcctcctgaatagctgggattacaggcgcccgccaccatgcccggctaattttatttttgtacttttagtagagatgggttttcaccgtgttagtcaggatggtctcgatctcccaacctcgtgatccacccgcctcggcctcccaaagtgctgggattacaggcgtgagccaccgcgcccggcctcctcgcacatttttctcttcatttctccagaatcttcacatttccactcaggaatctgctgagtccaccagtctgggtcacgtgtctccccaggcttcccccaggcccctggactcctaatcccagccctggccaccctgagtggtcaaagtctggggaccacggtttgccacctccattggactgagggtgggggttggctgtctccacctccactgtgtcccaagcacggccctgcctggggccaggcacacagaagggtcttcaggaatgtgggttgatgctttgctttcagaaataggaaggaggaccgggagcactggctcacctctgtaatcccagctactccagaggctgaggctgaaggatcatttgaacccaggaagtgggttcaagtgactccatctcaaaaaaaaaaaaaaaaaaaggctgggctcagtggctcatgccttaatcccagcactttgggaggcggaggtgggtggatcacctaaggtcaggagtttgagactagcctggccaagacggcgaaacctcatctctactaaaaatacaaaaaattagccggatgtggtggtgggcgcctgtaatcccagatactcaggaggctgaggcaggagaatcacttgaacccgggaggtggaggatgcagtgagccaagatcacaccattgcacgccagcctgggtgacaagagcgaaatgtcgtctcaaaaataaataaataaaataaaataaaaattaaaaaaattaaaaagtaaattaaattaaaaataaaaaagagaaagaaacaggaaggaaaggaggagatgtcaggagcgttgcacattccagcctggggaactggagaacagccctgcccttctcttcctacctccctgattgtttatttaagagctggcctgtctgggcggctcagccctgtctcccccagctgcagggtggcaggccccagtggctcctggtgcaattgtaactcagggccgggcgtggtggctcacacctgtaatcccagcactttgggaggccgaggtgggcagatcacatgagaccaggagttccagaccagcctgggcaacgtggtgaaacgccttctctactaaaaatacaaaaaattagccgagcgtggtggcaggagcctgtagtcccagctactcgggaggctgaggcaggagaatggcgtgaacctgggaggaggagcttgcagtgaggcgagatggctccactgcactccagcctgggcgacagagcgagattccgtctcaaaaaaaaaaaggtaactcaggtttctgagccttgaagcccaaagctggggtggcaggcactgccctccccacctcccccaaaatccagccaaggtggggacttgtttccctaccacagcaaggtcccagcctgggaacctacaggtatttcagggctcaggtgacctggatggaaagacattcaatacttcctaggaggcaggataagacaatggttgagggggaaatggaggcagagagatgggcctccccagcttcttctttttttttttttttttttttgagacagagtctcgctgtgtcacccaggctggagtactgtggcacaatctcggctcactgcaacctccacctcccgggttcaagtgattctcctgcctcagcctcccgagtagcagggattacaggcccacgccagcatgcctggctaatttttatatttttagtggagacggggtttcaccactttggtcagactggtctcaaactcctgacctcaagtgatcctcccacctcggcctcccaaagtagtgagattacaggtacaggtgtaagccaccacgcctgacacccccctacttcttagatgatcttgggtaacggattccatctctgaacctcgggtcatctctgaaataggatgaaagtaatacctaccccagatgtgccagcagcagtaaagaaaaccttagcataggtctgggcaatgccatgagatcagtatattaggggctggggggcctatgactgtgattgttactttttgctttagagagccctagtcagatgtgagtcaggccatacaatgcagcctctgaagggacatagccctatgggcgtggagggggaggttgtgaaatagccttgccctgggggtctgagggaacagggtcctaccctggcgggtctaaggcctgccctgggggtctgaaggatcagatatctcaaaaggccaatctacaacagcggtgttattggggcagtagcctatcttctaacctccaggataatggctgataatcttttatgtctgcgccttagcagtactcagggtcctctcctccccgcagcctgatgacctcccattaactttacaaaagcggttgagttttgggcaaagcctattatttaaactgtaccctaaatgtcttccaaagtttggcccaatagcccaggaataatgaagggaaaggcaagatgaagtatgggttagcttagcttactgttataatttttcttactgatataatttttgcaaaagtgggccaggcacggtggctcacacctgcaatcccaacacttgggaggtcgaggcaggtggatcgcctgagatcaggagttcgagaccagcctgggcaacatggtaaaaccctgtctgtactaaaaatacaaaaattagctgggtgtggtggtgcatgcctgtaatcccagctactctcaaggctgaggcaggagaatcgcttgaacccaggaggcggaggttacagtgagccgagatcgtgccactgcactccagcctaggtgacaagagtgaaattctgtctcggaaaaaaaaaaaaaagatttttgcaaaggcagtttcaggtttgaggggacacaggcccagccctttggggtctgaggggacataggcctgcccttgggggtctgaggggacgtaggcctgcccttggggggaagcgctgagaggacatggccctataaagccaattctagggccaggcgtggtggtttatgcctataatctcagcactttgggaggcccagacaggtggatcacttgaggtcaggagttcgagaccagcctggccaaatggtgaaaccctgtccctactaaaaatacaaaaattagctgggcgtggcggggggcacctgtaatcccggctactcgggaggctgaggcaggagaatctctggaacccgggaggcagaggttgcagtgagccgagattgtgccactgcactccagtctgggcaacagagtaagactccctctcaaaaaaaaaaaaaaaaaaagccaattctgagagtatacaatcacacagcacattcctagtgattatgtgggtgtcacccctgagggcagttggcctgaaggaccaggacattttgagtctgggaggcactgctaccagctcagacgcctgggcctagacatcccttgaataaactagctaatgaaaggtcccacctccacttctcctttctgagagaagtgtgaggcctggggcctggatttgagaggtgttagaatttgcactttagcccagagtgaggagcagtgtaggtgctgattaacaggaactggacaaagtcctcccagagctgaagagccctggcattttgggggtgggaggggcagggcaaaggggctccagtgagaagcacacctgaggctccagtgaggcccatgaaaccgaggaggctaatcccatcctgacacagacaaggcaaccatgtctcaaagtcccacagccaatgaatgaaacagccaggagagaggccaggacctgggaactttatgcttccaaccaccaaagccccgtggtggggggcctcatatggcctgagaaaatcagcaacacacattccacacaactgctttcttccaagggccaatttattattattattattattattattattattattattattattattttgagatggagtctcactctgtcacccaggccggagtgcagtggcgcaatctcggctcactgcaacctttgcctcccaggttcaagcaattcttgtgtcttggcctcccgagtaactgggatttacaggcatccaccaaccatgcctggctaattttgtatatatatattttaatatggaacgcttcacacctgggattacaggtgtgagccactgcccccggcccgaatgccaattaaaaaacaaaaaactttactattattatttttatttaagggacaaggtctcactctgtcacccagactggagtgtggtggtgagatcatagctcactgcagcctctaactcctgagctcaagtcatcctcccatctcagcctcccgagtacctgggactacaggtgtgcaccaccaatacacacatacagatagatagatagatagatagatagatagatagatagatagatagatgatagatagatagattagtttgtttgtgatggagtcttgctctgttgcccaggctggagtgcagtggtgccatcttggctcactgcaacctctacctcccaagttcaagcgattctcctgcctcagactctcgagtagctgggactatgggcacatgccaccacacccggctaatttttgtatctttagtagagacagggtttcaccagaaaaaaaaaaaacttatttgctttatcttttcgctttcccctggtcctgccagcctgattccttttcccgaattaggactccacaactaatgtttatcgaacatttactatagcccagaggtacagcttctcagcaaaccaatgggtcctattaatatcctcattttatagctgagtaaacagaggtacagacaggtgatgtgacttggccaaggtctcacagcttaattgagagagtcacatttttttctttctcttttttatgattattttaaaatttttaatttttttttagggacaagatctcgttctgtcacccaggctgggatgcagtggcatgatcatagctcactgcaaccttgaactcctgggctcaagcaattcttccgcctcggcctcctgagtatagctgtaatctcagcactttgggaggctatgcagggtggattgcttgagcccaggagtttgagaacagcctgggcaacatgacgaaaccccatctctacaaaaaatatagtagctgtgtaccagctactcgggaagctgagcctgggaagtcaatgctgcagtgagctgtgattgcaacactatacttcagcctaggtgttggagtgagaccctgtctcaaaacacacacacacacacacacacacacacacacacacacacacacacacacagcctgacagaggcatgcactgttgaaggtgataacgtggaagaggacaaaagtgacaggccaggtgctgggcctcatggcagcgttcaaactcctggagccagctatgcctgaagccagcccatcgattcctgatgtcgctgaagagttacaatcaggttttcagccacttgaaacagaaagagaccaaacgtacccagggaagggacaagtggattcagcccactgatacggcaatgggaagtagggttcatggaagggggaaaggcgggaccgtgtaaaagtgagtaggaacacgacccattccaggggacagacagcagatcatcggggtggctgccatgcaaaatttataaggggtcatggtgaggtcatggtgccacctttcagttgcaagagaaagggagaagccgtgactattgtgaaagcaaagtagaatctcaggaccccgaattcactaggtcaaagggaaaattaagctggggaactgaggcaccagtactgtcttccttttgttcccagattgctgtaattttccaaccccgtatcatagcttaatttactcttttttttttttttttttctgagacagcgtctcgctctgttgcccaggctagagtgcagtggtgaatcttggctcactacaacctccgcctcccgggttcaagcaattctcctgcctcagcctcccgagtagctgggactacaggcacccgccaccacgcctggctaattttttgtatttttagtagagacggggtttcactgtgttagacaggatggtctcgatctcctgacctggtgatccacccacctcagcctcccgaagtgctgggattacaggtgtgagccaccacgcctggccattttttaaatttcattttatttattttttttgagatggagtctcactctgttgcccaggctggagtatagtggtaagagctcagctcactgcagtctccacctcccgggttcatgcgattcttgagctcagcctcctgagtagctgggattacaggtgcctgccaccacacctggctaatttttatatttttagtagagacagggtttcaccattttggccaggctggtcttgaactcctgacctcaggtgatccacctgcctctgcctcccaaagtgctgggattacaggtgtgagccaccgcacccggccaacaccggatcgtatcttgaagggagaagggcttcatgcaggatcagtggggaacatcaaagggtctaagcagcagagtgacacaatcaagtttgtgtttagaagcttctgcactctcacacatttgctggtgggtgtggaagttggtacggcctccctggaaagccattaggcaaaaggccttaattttagatcctcccacaccctttgacacagcagttcttctctgagggatttattccacggctattgtcttgcatgcgaaaaatcaccacagccctgcttgcagtagcaaaagactagaagcaaactaagcacataccaggaaggaaccagcaaaatatgttgtggccattcatgctatggaacactagacagctgtagaaaagaatgagccacgtttacaggcattgcactggcgtgctggtaaatacttaaccaggccgggcatggtgtacttccagcattttggggggcctaggtgggagaagggcttgagcccaggagtttgagaccagcctgggcaacatagcaagaaccctgtctctacaaaaaaatacaaaaatttgtctgggtgtggtggcttatgcctgtaatcccaacactttgggaggccaaggtgggcagatcacttgaggccaggagttcaagaccagcctggccaatgtggcaaaacgctgtctctactaaaaatacaaaacttagccaggtgtggtggtacgtgcctgtattccgagctgtttgggaggctgcagcatgaaaatcacttgaacctaagaggtgaaggttgcaatgagctgagatcacaccattgcatccaacctgggcgacagagctggactctgtctcaaagaaaatacaaaaattagctgggtgtggtggcacgtgcctatagtcccagctactcaggaggctgaagagggaggatcgcttgagcccaggaggtcgaggctgcagtaaactctgattgcaccactgcactccagcctgagtaacagagcaaaatcatccatatatatatatgtatgtatgtgtgtgtatatatatatacacacacacatatgtgtgtatgtgtatgtatatacacatatgtatatatgtgtgtatatatatatatacacatatgtgtgtgtgtgtatatatatatatacacatatgtgtgtgtgtgtatatatacataattttttttttttgagacggagtctcgctctgtcgcccaggctggagtgcagtggcatgatctcagctcactgcaagctctgcctcccaggttcaccccattctcctgcctcagcctcccgagtagctgggcctacaggtgcccgccaccacgcccagctaattttttgtatttttaatagagatggggtttcaccatgttagccaggatggtctcgatctcccgacctcatgatctgcctgcctcagcctcccaaagtgctgggattacaggcgtgagccactgcgcccagccaatatatatatatatatattttttttttttttaatttaaccaccagctctctagggaagaaacagccctaatttataccatttgccaatttctacagtgtaaatattcccactgtggttgatttctagttactgataggatgtcattggatgtggaattcagaagagacaagcaaccacccactatcactcaggatttccaccaggcagagataagtagcctggagagcatagataatagtaaaaatgtagcaattaggatgcaatgcatttgaactatttattatatttgtttttaacataatttatttatctgtaactttgtatcatttaattgttaataatacctatgtttaacaactggtttgtgaaattcccaaaagtgtagcaatctgctcttgagaactgggcacagcacacattgagacacaaatggatcttcaagaagagaaagcaaaagccaacttttggaaaatggcctggaaggttctacactgctcactcccttaattttaattttatttatttatttatttatttatttatttatttatttatttattttttgagacagggtctcactctgtcacccaggctggagtgcagtggcgcaatcgcagctcactgcagccccctgggctcaagcgatcctcccatctcagccatctgaactacaggcacgcaccaccgcacccagctaattttaaattttttttttttttttggagatggaatctcactatgttgcccaggctggtctcaaactcctaggctcaagtgatcctcccacctcggcctcgcaaagtgctgagattacagatgtgagccactcgcccagccgtcattgtatttctgtacagcactgtctttctcccccactagaatgtcacctccacaagggtaagaacttgatctattttggattgttttttgtttttgtttttgtttttgccatatgcccagtgcctagaaaagcacctggcatataataggtacttagtaaacctgtgttgaataaataaatttactatttatttatttatttattttgagacggagtctcgctctgtcgcccatgctggagtgcagtggtgcaatcttgggccactacaacctccgtctcccgggttcaagtgattctcctgcctcagcctcccgagtagctggaactacaggtgtgtgccaccacacctggctaattttttgtatttttagtagagacgaggtttcaccatgttaaccaggatgttctcaatctcctgaccttgtgatccacccatctcagcctcctgaagggctgggattacaggcttgagccaccgcgcccggccaatttacgcttaaggaaaaaaaaaaggtgcaccagcctggacaatatagtgagatcctgtctgtacaaaaatttttaataaattatccaggtgtcatgggcttcagcctcaagcgcatggccgctcccattgaccatgtgggccagaccatagagcacatgggctctggcgtggagcacattggccctgccatcgaacacgtgggcctgaacatggagcacatggtgcttgcaggcatggaggctggcttggagcacatgggccccatgatggatcacatggtcactggcctagagcacatgggtgccaagagcctcacgtgcatgggcctggccatgtgtggcagtggcggtgccacctttgaccatgccatcggtatggagtgtggcaactttggaagctttgcaggttcccttggtggagcaggagaccatgctcctgggcatggccaggaaggcatgccaaatatttgtaagaaatctcccattcaattttacatggaagatgctaaaggacaaattcaacgagtatggccacatgctgtacactgacatcgaaatggagaacgggaagtccaaggggtgcagtgtggttaagtttacgtccccagaggtggctgagagagtctgccggataatgaacaacatgcagctgaatggccaagactgatgttcaaataaatagaaatgcttaagcagttgccttttttaaacatcaataccagacctctgaatttgtattttttcttgttaactttttttttttttttttgagacagggtttcgctcttgtctcccaggctggagtgcagtggcgcgatctcggctcaccacaacctctgcctcccggcttcaagagatactcctgcctcagcctcctgagtagctgggattacaggtatgtaataccatgccggctaattttgtatttttagtagagacagggtttctccatgttggtcaggctggtctcgaactcctgacctcaggtgatccgcccacccttggcctcccaaaatgctgggattacaggcatgagccactgtgcccggccctcttgttaacctttttatttttcttttccttttttttttttttgagacacagtctcactctgtcgcccaggctggagtatagtggtgcaatctcagctcaccgcaacctctgcctcctgggttcaagcgattctcgtgcctcagcctcccaagtagctgcgaccacaggcatgtgccaccacgcctggctaagttttgtatttttagtagagatggggtttcaccatgttggccaggctggtctcgaactcctgacctcaagtgatccacccgccttggcctcccaagtgctgggattacaggcatgagccaccacactggctttttttttttttttttttttgagacagagtctcgctctgtcgcccaggctcagtgcagtggcgcgatctcggctcactgcaagctccgcctcccgggttcacgcccttctcctgcctcagccttccgagtagctgggactacaggcacgcgccaccgcgcccggctaatttatttatttatttttatttttgtatttttagtagagacaggggtttcaccatgttagccaggatggtctcgatctcctgaccttgtgatccgcctgcctcagcctcccaaagtgctgggattacaggcatgagccacagcgcctggcagctttttttttttttttttaatttagcattttaattttttttttttttttttttgagacagagtctcgctctgttgccaggctggagtgcagtggtgcaatctcggctcactgcaacctccaactccctggtttaagcgatcttcctgcctcagcctcctgagtagctgggattacagacacgtgccaccacatccagctaatttttttttctttttttttgtatttttagcggagacggggtttcaccatgttggccaggatggtttcgaactcttgacttcgtgatccacctgcctcagcctcccaaagtgctgggattacaggtgtgagctaccgcgcctggccaatcattttattatttatttatttatttatttacttttgagagagtctcgctctgttgcctacgctgtagtgcagtggcacagtctcaactcactgcaaactctctctctcaggttcaagcaattctcctgactcagcctcccaaatagctatactacaggcactcaccaccacacggggctaattttttttgtatttttagtttcaccatgttggtcaggctggtctcacctgacctcaggtgatccacacaccttggcctctcaaagtgctaggattataggcatgaaccaccacgccagaccacttgttaaccattttaatttgttggctggatgtataaagatgttaaaaaagcttgaacccagggaggcagaggtttcagtgagccagagatcgtgccattgagctctagctgggcgacaagagcaaaactctatctcaaaaagaaaaaaaaaaaagaaaaagatggtaaaaaaaaaaaaaaaaaaaaccagttgctttttgggctaatttaattacttttttaaatgactggtgttccatttgactgtttgccttgagattgcactgtgcgcaattttttttgtagttatggtgtcttcttgacattgaatatgattttgataataaatactggttcttgaaaaaaaaattagccaggtgtgctggtgcacgcctatagtcctagctacttaggaggctgaggtgggaggatggcttgagcccaggagttggaggatgcaggtgagccctaattgtgccactacactgcagcctgggtgacagacagagagacagagagaccctgtctcaaaaataaataaatgaggccaggcaaggtggctcaggcctgtaatcccagcactttaggaggccgaggtgggcaaatcacgagatcaagaaatcgagaccattctggccaacatgatgaaaccctgtctccactaaaaatacaaaaattagctggatgtggtagtgcgcgcctgtagtcccagctactcgggaggctgaggcaggagaattgcttgaacccgggaggcggaggttgcagtgagctgagatcgcaccactgcactccagcatgggtgacagagcaagattcagtctcaaacaaaaacaaaaacagaaaacaaaattagctgggcctggtggcacatgcctgtagtcccagctacttgggaggctgaggcaggagaatcgcttgaacctgggaggtggaggttgcagtgagctgagatcgtgccgttgcactccagcctgactgacaagagcaaaactttatctcaaataaataaataaattaaataaatgaaagttgcagacacatgtgaatgacctgggcagcatttctccacctgcgcttgcatttgctagacagtctgtgactctctgtgggagaaaacacaagaaaccggcccctctgctggttccccacctggcctggctctcctgttctccaccctgcacactcatgcctcggaacctgcttctcctctgagcctccctcacagtggcccggcccacgtggcctttaatctgcccacatcagagcctccacctccggcctatggcccatcagaggcagctggagccgggcatcctccccacgtgggcctttgaggatgggatgaaggaagctgagcggaggtcgcagtgcctcccaggaggggcctggaggggagggaacaggggagaggagaaggtttttccactgtgtcccctcctgtgactgtagaaatgagccatgtgacttcaattacctattaacattttttgaagtgttctataaaaagtgccagcctcgggctaccgtggggagcagggaaggaggagggtgagtccaggcgtgaggaggccggagcggtgacccgggagtggggacggccggggctgccaggcagtcacagcctgtcccagaaggccccgtggtggaatgctgtgcagaaagtccttagaaggctctggcgggggcggcctgtccctcagcaccctcctctctaagccaacttcagggtttcccggaaaggcatctcctccaccacctctgcccctacccaaaatgatccccaaatgtctggtggataaaaactctcgatctttccttcgcactaggtctgtaagggtgggagctgactcacatctggccctccacctccacccttctcctctctcctccccgcctccttctctctcacctctgtcctctcccttcctctccctcctctccctctttccctcctatccctcctcctccctccaacccctcctcctcccactgcctctcccaccctccctcctttcagcgagacacaacctcctccagggcccccaaaacaccaaccctctctctgctccacacctttgcccctgctgttccctggtagatttcatttgaatttctctgatgattcatgacattgagcatcttttcgtgtgcattatgggccatttgtatgtcttctttgcagaaatgtctattcaagtcctttgctcatttttgaatcggggtgcctggaactctctgccctcatccccgcccccgccacctcttcaccaaaccctgttttctcctggagatcttggatccttccttcatctaacaaatatttgccggacgtcaaccctgtgtcgggcaccctgccagggattggggaacacagggttaggagaggctacattgtagtggagaaggcaggaaataaaggagtcaacagagactgcaaacaagggaatgttttcttttcttttttttttttttctacagtgttcatgggcttgatttaaaagcttgcttatttatttatttatttatttattcattcattcatttatttatttttgagacagggtctcattctgtcacccaggctggagtgcagggcgtgatctccactcactgcaacctctgcctcctgggttcaagtgattcttttgcctcagcctcctgagtagctgggattacaggcgcccgccaccacgcctggctaatttttatattttttggtagagacagggtttccctgtgttggcgaggctggtctcgaactcctggcctcaagtgatcctcctgcctcagccacccaaagtctgggattacagacatgagacacagtgcccagccaaaagcttatctttcttatttatttatttatttatttttgaaacagagtctcactctgtcgcccaagctagagtgcagtggcacaatctcagctcactgcaacctccacctcccagtttcaagtgattctcctgcctcagtcccctgagtagttgggattgcaggtgtgcaccaccacacccggctagttttttctgtttttagtagagacaggatttcaccatgttggccaggctggtctcgaactcctgacctcaggtgatctgcccacctcggcctcccaaactgctaggattacaggcttaagccaccgtacctggcctatttgtttttggagatgaggtctcgctattttcctcaggctggactcaaattcctgggctcaagtgatcctcccacctcagcctcccaaaatcctagtgtttacaggtgtgagccccagcacttgacataagagaactattttaaaatttatttttagagacagagtctcaccccatcacccaggctggagtgcagcagtgtgatcatagctcactgcagccttgaactcctgggctcaaacaatcctctcaactcagcctcctgagtagctgggactacaggcgtgcaccaccatgcccagctaatttttttgatttttttgtagagatgaggtctcactatgttgcccagactggtcttaaactcctgggctcaagggatcctcctgcttcagcctcccacagtgctgagattacaggcatgagccactgcacctggccaagacaattttttgaaagagctcagtgctgcaagaagaattcgtctgcaatctgagtgaggataaggaacctgcctgatgagggactgagaagagagaagctggcaaaagaaatagcaagtgcaatgaaccagacgtgagaatgaacttgaagtggtcaggaatcagatggagaccaggggccatggctcacacctgtaatcccagcactttgggaggccaaggcgggtggatcatctgaggtcgggagttcaagaccagcctggccaacatagtggaaccccgtctctactaaaaatacaaaaattagctgggcatgttggcgggcgcctgtaatcccaactacttgggaggctgaggcaaaagaattgcttgaacccaggaggtggaggttgtagtgagccgagatcacgccactgcactccagcctgggcgacagagcgagattctgtctcaaaataaataaataaacaaaaatgaaaagaattagaaggaacagggtggctggattcaagggattgtggggaagtgtcatcagatgtggctgaagaggtaggttgagatgggcatcatagactctgtgaagaacttaagaacctcctcttccaggaagcccttcttgactgcatcaactaggttttcccatcccagccctgttcccactaggttgttgctcttggggcactggcctatctgctccgctggcctgtgagccctctgacggccaggccagtcaccactatgtcctcagcatcacctagcacaggcctgagcacacaggaggtggtcggtaaatgcccaggtcattctggcactgccagcaagccccaagaagcatcccttgctctgcctccccgccgcgcacctctgttcctgggcgtagcaccagggattcctgagttccccgtttggccattcacactggtttcagcctagcctctttcatcccatcctcaaaggcccatgtggggaggaggccgggatccagccgcctctgatgggctgcaggccggaggtgaaggctctgaagtgggcagatcaaacgccatgtgggttgggccgccgttggggaggctgagaggagacgcaggttcccaggcatgagtgtgcagggtggagaacaggagagccaggccagatggggaccagcaaaggggcccatatgttcacccgtctttataataacacagcttccaattgttgattcattacggccaggtacagggttaattttttttttttttttttttttgagacagggtctcactctgtcacccagactggagtgctgtggtgacatcatggctcactacaggcgtgtgctaccatgcctggtttattatttttaaaaatgttttgtaggctgggtatggtggctcaagcctgtaatcccagcactttgggacgctgaggcggacggatcacctgaggtcaggagttcaagaccagcatggccaacatggtgaaactccatctctactaaaaatacaataattagccgggtgtggtggcaggcacctggagtctcagctactagggaggttgaggcagaagaatcgctttaacccaggaggcggaggctgcagtgagccaagatcacgccactgcactccagcctgggtgacatcacgagactctgtctcaaaatagaaaaaaatgttttgtagaaacaggatctcactatgtcacccaggctggagtggaggcaccgttgtagctcaatccagcctcgaactgctgagctcaagtgatcctcccacctcagcctcccaaagtgctgagattatgggtatgagccaccatgcccagctaaaagtcaattcttttgatagaaaggtcagaagagcagagaagatcaaacagctggttcatgtgctgatgggaatgatctggatttctagattccagaagagaagcaagagaggaaagtggctggattgttgtcgttgagtaagcaagaggggaaccatccctaggctcaagagaagaggtcttgagaaagagtatatggcagccaggcgcggtggctcacacctgtaatccaagtactttgggaggccgaggcgggcggatcacgaggtcaggagatcgagaccatcctggctaacatggtgaagccctgtctctacaaaaaaaaaaattacaaaatattagccaggtgtggtggcaggcacctgtaatctcagcaactcaggaggctgaggcaggagaattgcttgaacctggaaggtggaggttgcagtgagccgagatcacgccattgcactccagcctgggctacaagagtgagattccgtctcaaaaaaaaaaaaaaagaaagaaagaaagagtataaggcactctgagaggctgaggcgggcggatcacttgaggccaggagttcgagactagcctggccatcatggcgaaaccccatctctactaaaaatataaaaattagctgcttgtggtggtgcgtgcctatagtcccagctactctgaggcacgagaatcacttgaatccaggagacagaggttgctgtgagtagagatcacaccactccactccagcctgggtgacagaaaaaaaaaaaagaaagaaagagtgtataaggctggacacagtggcttatgcctctaatcccagcactttgggaggcggaggctttcaaatcacttgaggccaggggtttgcgaccagcctggccaacatagtgagacctcacgtccactaaaaaaaaaaaatacaaaaaattagctggacatggtggcacacacctgtaatcccagctacttgggagactgaggcatgagaatcgcttgaaacagggaggcagaggttgcagtgagttgagatcacactattgtactccagcctgggtgacagactaagactctttctcaaaaaaaagaaagaatatagttcagccgggcacagtggctgatgcctgtaattccagcactttgagaggctgaggcgggaggatgccttgagcccaggggtttgagaccaacctgggaaacagcaaatccccgtgatatgatttgggtgtgtgtcctaacccaaatctcatgtagaattgcaatactcagccaggtgcggtggctcacgcttgtaatcccagcactttgggaggccgaggcgggtggatcgcaaggtcaggagttcaagacaagcctggccaagatggtgaaaccccgtctctactaaaaatatataaattagctgggtgtggtggcacgtgcttgtaatcccagctactcaggaggctgaggcagagaattgcttgaacccgggaggcagaggaaacgcacaaagcaaggcagcaaaagcagagatctattttaaaggaaagcacacttcacagggtgggagtggactcaagctagcagctgaaaagtgtccgttacagaatttttggggatttgaataccctctggaagtttcccattggcctgtgaccagtctgattggttgtaggagaggaccaattcgaatgaagagtaggcctgtaaccagtctgattggttgtgggagaggaccaattagaatgatgcataggcccgcagccagtctgattggttgcaggagggggccaatcagaatgaagagtaggctcaggaccagtctgattggttacaggaggggaccactcagaggtactttcatttttcaacagccatgcagaaaaaggagggtttgaaaggggagtagcctctgatatccagtcatcatgaattggccttaggctctctggctccagaccctattctcctgcctcagttagagtgatgcaaggagggccttgagctgaggaatgtggacagcttcctgaagctggacagggcaagagagcctccaggagaagccctagagtctccagaagggatgcagcccagccaacaccttgatattagccctgtaaaacccattttgggggcctggggcaatggtttatgcctgtaatcccagcactttgggaggccgaggcaggaagatcgcttgagcccaggagttggagaccagcctgggcaacataggaagagtctctacaaaaaattttttaaaattagccgggcatggtggcacacacctgtagtctcagctacttgggaggctgtgacaggagaactgcttgagcccaggaggctgaggctgcagtgagccatgatcaggccactgcactccagcctgcatcatagagccagaccctgtggtaaaaaaaaaaaaaaaaaaaaacctccagaacagtaaggtagtaaataaatctgtctcctatggagccactaagtgtatggtcatttgttacaggagcaataagaaaccaatacccttggctgtgcacggtagctcacccttgtaatcccagcactttgggaggccgaggcaggcggatcacctgaggtcaggagttcaagaccagcctggccaacatggagaaaccccgtctctactaaaatacaaaaaaaaatcagctgggtgtagtagtggtgggcgtctgtaatcccagctattcaggaggcgagactgaggcaggagaatcacttgaacccgggaggcagaggttgcagtgggccgtgatcacggcactgcactccaggctgggtgacagagcgagacttcgtctcaaaaaaaaaaaaaaacaaaaaaagccagtcacagtctgcatggaacagaggaagagcgggtggaagatgaggtcagacagagaacagggagctggtgagtcatggtgaagatgttgtcttttagtgagtgtggcaggagccacagaagggatttgaggaggagaatgacatcatgtcacttctgtcaaaggattctgctgccatatggggacctttctgttggggacaagggcagaagcagcgaggaggtgactgcaattttccaggtgagaaatgatcatggctagactagctctgggggttcagactttgtttttgtttttgtttttgtttttgtttttgttttgaggtggagtctcgctgtgtcttgtccaggctggagtgcaatggtgcgatcacggctcactgcagcctccatctcccagcttcaagcgattctcctgtcttagccttccgagtagctgggattacaggcgtgtgccaccacacctggctaattttgtattttttagtagagacggggtttcaccatgttggccaggctgatatcgaactcctgacctcaggtgatccgcctgcctaggcctcccaaagtactgggattacaggcgtgagccacggcgtccagcctttggggggtccgacttcgggtgcattttgaaggtcaacaggatttcccctggatgggatgtggggtgtgaaagcagagaggagtcatgagccctttctaagtttccagacagcatgcttgaacacacgatggtttctctggggctcaaggacattaggctactcctggcccttagcgtgtagctgtacacaggaagtgtcctgctgtgctgtattaattaaagtggatgttgtcagccgagttggagacatcccgggggaggaaaggccgggctgaccctggttaacttcaggcaggtgtcaggcatgcagcgaatgtcatcttccgcctctcattctccctctgggctgggcctgcctcttctttccccagctagcaaataaatcatctctcccatctccacctggaattcattctcactcatgtttaatgaggctaccacacccttctgccaggtgtgtcttcacccaggtcgctgataactacaaataggttatatttcaactcttttgagtatgctgtgaggtagagatccaatttcctgctgcgtgtgcagaacagaagacaactgtctcaaacaaaaagaaaaaccaaaacaattattttaggcctggcgcagtggctcacacctgtaatcccagcactttgggaggctgaggcaggaggccgagctggagctcagtagttcgagaccagcctgcgcaacatagggagacccctgtctctgctaaaaattttaaaaatcagcctagcgtggtggtgcacgcctgtagtcccagctactagtgagactgaggcaggagtgatggcagtggctgctgtcattacaccggctgcagcagggaggtgcggctggggctacacactccatggagccggtggaagccctgccccttctgagctgtggtgggagttccccagatgccactgcagccgcccaaaccgccactgtggattgagccttcctgtgctcttgcaggggccagaagtaggtagggtctgccctcccgggtgcagctgcagctgcccccatggctgccaacctaggcctccagctccacagagtgagcaagagccggggacaagtgggagccccaccccttccgagttggcagggcaggagctccccggatgcagctgtggccgccctctgaggctgaggacctgggcctctctgcagcctgcactctcagaggccgggaaggcccccccaatctctgcagactgctgggtgtcttctcctgctgcctggcctctcttctctcccagcgccagctctgatctgggatcggggttggggtccagtcctggggccatgaatggcagcaggaggcagacggattcctgggcagaagttggtggggggtccctagtaaggccccaccttcttgccagggagggcctgaaggctgggggccaggctgccaaccccacagacaagagtggggacttgtacctcctctgggcccacgcatggcagcccatggaccaaccagcacgtacttcctcctctctgaggtccataaaagccccaggctccaccagagcagggcagagggcagaggacagagagacaatgggattaccacctgcacagaggagctaccctctctactgagagcttcagagacctgcagagacgcctacatgacctgcctgccgagaggaaccaccctcttcagggcctcatctctgctgagagctgaacactcgatggggtgacctgcctactgagaggagctgcccactgacggtctcctctgagctgttctaagactaaataaagctcctattcatcttcttcacccttcacttgtctgtgtacctcattcttcctggacacaggacaagaacttgggcaaaggcactgcagccacagaggtttctggccagaaaagcaacaccccaaagatcccgtaacaggaggatcacttgagcccaggaggcggaggctgcagtgagctgagattgcaccactgcactccagcctgagtgacagagcaaggccccaactaaaaaacaaaaaacaaaaaaagcccagatattttataataaaaaaaaaattttatggctggccacggtggctcacgcttgtaatcccagcactttgggaggccaaagtgggcagatcacttgaggtcaggagtttgagaccagcctcaccaacacggtgaaaccccatctttactaaaaatacaaaaattagccaggcatagtggcacacgcctgtaatcccagctactggggaggctgaggcacgagaattacttgaacctgggaggcagaggttgcagtgagctgagatcgtgccactgcactccagcctaggcaacagagtgagactctgtctcaaaaaaataaaataaaataaaataaaaaataaagtgaatgggaagacacagagtctagcactctagaaatctgggttccagtctcatctgctcattgtgtgtccttgggcaaatgatcttccttatctacaaagaggagataatactcagaattgcaatgctaataccaagagccacttcacagcgtcattacaagattaaatgggattatgcctttaaagccttggaagctgctgggcctagagcaggagctccccctaacagttcagaagcttccttgaggctgggctcggtggcttacacctgtaattccagcactttcggaggcagaggtgagcagatcacttgagcccaagaggttgagaccagccggggcaacatgatgaaaccgccatttctttttttttttttttttttgagactgtgtctcgttctgttgcccaggctggagtgcagtggcgcgatcttggctcactgcaagctctgcctcctgggttcacaccattctcctgcctcagcctcccaagtagctgggactacaggcgcccgccaccacgcctggctaattttttttttttttttgtatttttagtagagacggggtttcaccttgttagccaggatggtctcgatctcctgacctcatgatctgcccacctcggcctcccagtgtactgggattacaggcgtgagccaccgcgcccggccttgaaaccaccatttctacaaaaaacacaaaaaattagccagacttggtggcatacacctgtaatcccagctacccaggagactgaggtgggagaatcacccaagcctgggaattcaaggctgaaatgagccatgatagtgccactgcagtccagcctgggcaacagagtgagaccctgtctcaaaaaacaaataaaaccgccaggcacggtggctcacacctgtaatcccagcactttgggaggccgaggtgggcggatcacgaggtcaggagatggagaccatcctggccaacatggtgaaaccccatctctactaaaaattcaaagaattagctgggcatggtggcacgtgcctgtaatcccagctactcaggaggctgagttagtagaattccttgaaccagggagtcagcggttgcagtgagccaagatggcgtcactgcactccagcctggcgacagagaaagactctgtctcaaaaaaaaaagaaaaaagaaagaaaaagaaacaccgtctctaaaaatacaaaaattggccaggcatggtggtgggcacctgtaatcccagctacttgggaggctgaggcaggagaattgcttgaacctgggaggtggaggttgcattgagccgagatcgcgccattgcactccagcctgggagacagagtgagagtctgtctcaaaaagaaacaaaaacaaaaacaagaagcttccttgtttggtggctttctcaggttcctcttcgactttctgttctctaaaccctggagcccctcaaaagcccagaactgactctggcctgtgctttagtgcagttgcaccagggttgcaaacacatggcctgagggctccatccagccaccacatttcgtttgccaccccagagtatttttaagttttttggtttgttttttttttgagatggagtctcgctcttgtcacgcaggctggagtgcagtggcacgatctcagctcactgcggcctctgcttcagcctcccaagtagctgagattacaggcgtgcaccaccatgcccggctaacttttttatttttagtagagatggggtttcaccatgctggccaggctgacctcagatgatccgcctgcctcggccccccaaagtgcttggattacaggcatgagctaccacgtctggcccccatgtcttaaaagaaaataaaagacaggtgatctccactccacaggctccaccacccgcgtggtcttaagggcaccaacttgagtggctgtcactctcagctgactgagacttactcttgcttcccatttcactgagaagaaggaagtcattggagtagggacttttgggaactccccacaccaacaccaccaccacctgccttggcgcccacgcaccccttcctcccagatgcctctcgtgtgcttggataatcccagctgcgccttccatccctctcccatctctttcctgcatcttccggtttccccttgtctgttgcatcatccccatcagcataaaactgatgatttgagctgagcgcggtggctcacacttgtaatcacagcactttgggaggctgaggcgggcggatcacttgaggtcaggagtttgagaccagcctgacgaacatggcgaaacccagtctccactaaaaatacaaaaaattagcggggtatggtggcgggcgcctgtggtcccagctagttgggaggctgaggcaggagaatcgctggagcccaggaggcaaaggttgcggtgagccgagatcgcacaactgcactccagcctgggcatctgtctcaaaacaaaacaaaacaaaacaaaacaaaaacctgctgtgatatcatccactccaccaaacaccctccaatctcattcccccctctagcgactatttctcttctccctttatagcaaaacttcctctaaggttttttttttgttttttttttttttattcaacattatcatcagacacttatatttagccatcaacagcatgggtgcaaaacaaaaatctacattaaaaccctttgttggaatgctttgcactttccacagaagagaaactgaaataacctgttatacgattagtcacaaatacagtcctggagttttttgtttttgttttttgtccatatacatgagtattgtctccaatacatcttccactgggtatggtggctcatgcctgcaatcccagcactttggaaggctaaggcgggaggattgcttaagccagggagtttgagatcagcctaggcaacatagtggaacttcgtctttaaaaaatattaaaaaatcaggagccgagggtggtggctcacgcctgtaatcccagcaccttgggaggctgaggtgggtggatgatttgaagtcaggagttcaagaccagcctgaccaacatagtgaaaccccatctcgactaaaaatattttaaaaatagccggatgtggtggttcacgcctgtaatcccaggtactcgggaggctgaggcaggagactcccatgaactaaggaggcagagcttgcagtgagctccagcctgggcgatggagggagactgtgtctcaaaaaaaaaaaaaaaaaataggcaggcatggcggcacgcacctgtggtcccagctactcgggaagctggggtgagaggattgcttgagcccaggggttgagactgcagtgagctgtgatcatgccactgcactccagccttgtcaacagagtgagagcctgtctcaaatcaaacacggccgggcgcggtggcgcatgcctgtaatcccagcactttgggaggccgaggcaggcggatcacaaggttgggagatcaagaccatcctggctaacacggtgaaaccccgtctctactaaaaaatattaaaaaaaattagccgggcgtggtggctggcacctgtaaatctcagctactcaggaggctgaggcaggagaatggcgtgaacccgggaggtggagcttgcagtgagccgagatcgcgccactgcactccagcctgggcgacagagcgagactccgtctcaaaaaaagcaaacaaacacaaaaaacacaccttcttcataacagacaggccctgccacccctgtgcctggctgagttcacaagtctgtttgtaacctgagcttccctgtcatttccctggctctgtctgctggctaagcttcatttccccaaagtaactaaagctttctgccaccgccctggccaccagggctgctggaactgccatagccatcttggtttcatgttttggcaaaatattggcctccatcaccataggggccagggcttctgcctccaaatcctcctcccttcatggatccaaaattcgaagactgattgctgttatggccaagattactacagcttttgccacctccaaaactacttccatcattactgtgatggggttttgtttgtttgtttgtatttgtttttttgtttttttgtttttgtttttgacagagtcttgctgtgtcgcccaggctggagtgcagtggcacgatctcggctcactgcaacctccacctatgggttcacaccattctcctgcctcagcctcccaagtaggtgggactacaggtgcccaccaccacatctggctaacttttgtattttgtatctcttcctgaaacacctgtgcagacacaaacagaaataatgttttaccagctatgtgggcaccccttaacccaatcaagttgacacatacaataaaccatcactgctgggtgcagcggcccacgtctgtcatctcagcactttgggaggccgagccacgtggatcacctgaggtcaggagtttgaggccaatctggccaatatggcgaaaccctgtccctactaataatacaaaaattagccaagcgtggtggcaggcgcttgtagtcccagctactcgggaggctgaggcaggagggttgcttgaacctgggaggcagaggttgcagtgagccgagatcacgccattgcactctagcctgggcgacacagcaagactctgtcacaaacaaagaaacagacaattagccaggcgtggtggcgcatgcctgtaatcccagctacttgggaggctgaggcagaagagtcgattgaacccgggagggagaggttgcagtgagccgagatcacgccattgcactccagcctgggcgacacagcaagactctgtcacaaacaaagaaacacaattagccgggcgtggtggcccatgcctgtaatcccagctacttgggaggctgaggcagaagaatcgcttgaacccgggaggcggaggttgcagtgagccgagatcgtgccattgcactccagcctgggtaacaaaaacaaaactccatctcaaaaaaaaaaaagaagaagaagaggaagaaggccaggcgcaggggcttgcacctgtaatcccagcactttgggaggctgaggcgggcagaccacttgagctcaggagttcgagaccatcctggccaacatggtgaaaccctgtctctgctaaaagtacaaaaaaaattaactgggtgtggtggcacatgcctgtggtcccagctacttgtgaggctgaggcaggagaatcgcttgcactgaggaggcagaggttgcagtgagccgagatcacgctactgcactccagcctggccacagagcaaggctctgtctcaaaaaaagaaataataatcttttggatgttgttcttcagtgtcctctaatgccatcaacaaagatacttttatatatatacacacatatagatatgtatatatatatatgtatagcatagttatcaaatttaggagattaaatactgatgtattacattttatttaatatgaaatctatgataagaggaagaaatcatacacacagttgacagttcagatttataaaaagcataaaattagcatagataaattattgatgactaatgacactagctataagtttctactgtagaatacgtcacaccgtgaatgtgggtcattttttccgccactagactgagtcattgagcacagaagatacatcaattttatgtgttagcaacatgtacaattctttttttttctttatttcttctaaaaaaaaaacaggatacatgtacagaacgtgcaggtttgtcacgtaggtatatgtgtgccatggtggtttgctgcacctgttggcctgtcctcaaagttccctccactcacccgatccttttttctttttttttttttttttttgagatagggtctcgctctgtctcccaggctagagtgcagtggtgtgatcacagctcactgcagcctcgcgtccaactcttgggctcaaatgatcctcccacctcagcctcccaagtagctgggattacaggcaggagccaccatgcttggctagttgaatttaatttttatttatttatttatttatttttttcatagagacagggccttgctattttactcacgctggtctcaaactcctcggctcaaatgatcctcctgcctcagcctcccaaatctgggattagacgtgagccactatgcccagcccagagcatttttatcacccaaaaatgaaactccacaaacattaagtaaacactccctgctctcctcttcccccagcctcgggcaaccactaatctaccatctgtctctgtgctgtacatttcatgtgaatggaattctgtgctaggtggcctcttgtgtctggcttctttcactcagcatcacatcttcgaggttcactcatgttgtagcatgcgtcagtgctgcatttttttctttcttcttttttttttttttttttttttgagatggagtctcgctctgtcacccaggctggagtgcagtggcacgatctcagctcactgcaacctccacctcccgggttcaaacgattctcctgcttcagcctcctgagtacctgggactacaggcacgtgccaccacgcccggctaattttttttgtatttttagtagagatgcggtttcaccatattgtccaggctggtcccgaactcctgacctagtgatccgcctgcctcggcctcccaaagtgctgggattacaggtgtgagccaccgcgcctggctgagttctgtacttttaagcttttctcttgacataaaattcagacgcgaaatgcagtttccgtgcagtgaggcacacaaacacctttgctgtggattccccatttcgcacatgggaacagatgcattttcccaggcaattaaataccaaggacttcctgaaggcactgagtgtccaggccaccgagtttgtccttgagtagctgtaaacaccctcacccccgggtatccaggaatctgcccgatgccctggtggccagctccaggcattaacagcttcctccccatttccagcagtttccttcagttactgagtggaaagttactgagtcagaggctgcggagatgaggttccttggcagatggctttcatttttacctctccctacctccctgtcgtccacacagccccaacacacacacacacacacacacacacacacacacacacacacacacttacacacacacagacctgttttctttttctttttttttttttttgagacggagtctcgctctttcgcccaggctggactgcagtggcgctgtcttggctcactgcaagctccgcctcccgggttcacgccattctcctgcctcagcctcccgagttgctgggactacaggcgcccgccactacgcccggctaattttttttgtatttttagtagagacggggtttcaccgtgttagccaggatggtctcgatctcctgacctcgtgatccgcccgcctcagcctcccaaagtgctgggattacaggcgtgagccaccgcgcccggcctttttttttttttttaatttttttttttttttcaacccatgtggaccaggttggcctcgaactcgtgccctcgaaccctcgcctccctgagggtccgagggcccgcgcaaccggctggagccacaatggctccacctgttttcttatctacaaaacatctgtttttatttaatatacatcattttatttaatatgggagggagaagaacagcagaaatagctccttaaagccccgttctacaggatgtagtggggaagagggaagctctgacgttagtctctcccttcatccatttcttttataaactgcctgctctatttttataaacattttgtcctggataaaccttcccaaaggccataatatacaatgaagaaagactaacagaaagcaaaacactaaacccttcttcctgaaaaaagataccacatacaaagtcaaaagacaaaagcagcctggggggaatgtttgtgacatgtatgacagactgtggatccacaataaataaagagctactacaaataaacaagaaaatgacaaacagcacaggaggaaaatggtcaaaaggtttgtaccaacacagaagaggaatatgaatgactagtaatgttcgacctcattggtaaccaggcacaataaaataaacatagtgagatcgcacagtagcaaagctacatggaaacagggggtctcctcctatgctaccagagagtaaaaatcagcacagcccgtttggagagcaattggggtgaacctatcaaatgacctgttacagatacatgtacccttcagcccagagattcatttccaggtacttaccctccacatgtatgtgaaaatgcacgtgggcaaagacattctttcatcttcattaggaggagccacgcaggcctggttaagtaacataggatgcacccacataacgggattccacacagactatacacagaatcacctccaagatgcactgatagcaagctgcagaaccacatacggtgtgatcctaagacatcgaaaaaaccagttatatcctcacaagtacgtgcatgaaatttatttatgtatttatgtgttttatttattaatttgtttccaatatggagcttcgctctgttgcctaggctggagtgcaatagcacaatcttggctcactgcaacctccgcctcccgggttcaagcgattctcctgcctcagcctcccaagtagctgggattacagggatgcgctaccacatcggctaattttttgtatttagtagagatgtggtttcaccatgttggccaggctggtccacccacctcggcctcccaaagtgcggggattacagatgtaagccactgtgcctggccttatttctttattttgagatagggtttgttctgttgaccaggctggagtgcagtagctagatcttggctctctgcagcctcaataccttgggctcaagcaatcctcccatctcagcctcccaagtagctgggatcgcaggtgtgatacctaccatgtccaggatatttttcttttttttttttttggtggagatgggggtctcactatgttgctcaggctggacacgaactcctggcctcaagcaatcctcctgccctggcctcccgaagtgctgggattataggtacgagccactgcgcctggccgggttcattccttttcaatgttgaggagtgctccattgcctggaggggccagagtttgtttttctattcatttttgaagaatatttaggttgtttccagtttttggtgaataaaaccactataaacattcgtgtggccaggcatggtggctcacgcctgtaatcccagcactttgggaggccgaggtgggcggatcatgaggtcaggagatcaagaccatcctggctaacacggtgaaacttgtctctactaaacaaaatacgaaaattagccgggcgtggtggcaggcacctatagtcccagctacttgggaggctgaggcaggagaatggcatgaacctgggaggcggagcttgtagtgagccgagatcgcatcactgcactccagcctgggagacagagcaagactctctctctcaaaaaaaaaaattcttgtgcattttcgttgtttttctgtttacaactacaaggtaaatgtcattcattcaggtgttttgtaacatctttgttgacatatatttacataccattcaattcacttatttaaaatgtatacttcggccaagcgcggtggctcacgcctgtaatcccagcactttgggagcaggaggggggtggatcacgaggtcaggagattgagaccatcctggccaacatggggaaaccctgtctctactaaaaatacaaaaattagctgggcgtggtggcgtgcgcctgtagtcccagctacttgggaggctgaggcaggagaatcccttgaacccgggaggtggaggttgcagtgagccgagactgtgtcactgcactccagcctagcgacagagggagactccactaaaaaaaaaaaagtatacggccggccgcagtgactcacacctgtaatcccagcactttgggaggccaaggcgagtggatcacgtgaggtcaggagttcgagaccagcctggccaacatggtgaaaccctgtctctactaaaaaaaacacacaaaaaaattagccaggcatggtggcatgtgcctgaagtcccagctacttgggaggctgaggcaggagaatcgcttgaacccgggaggtggatgttgcagtgagctgagatcattgcgatcatgccattgcattttagcctgggcaacagagcgaaattccctcacaaaaaaaaagaaaagaaaagaagttaagaaagacagaaaagaaaaggaaaagagaagagaagagaagagaagagaaaagaaaagaaaagaaaaagtaaagaaagaaaagaaacccaagccaggttcagtggcttgcgcctgtaatccccgcccctcagaaggccagggcataccaaagttattgaaataagaaatcaagaaagagagaaaaaaaaaagaaagaaaaacaagtaaaaaggaggctgaagcaggaggattgctcaaggccaggagtttgagaccagcctgagcaacatagcgagaccctgtctcgaagaaaaataattttaaaattggccaggtttaaaacaggcacagtggttcacgcctgtaatctcagcactttgggaggccgaggcgggcagatcacgaggtcaggagatcgagaccatcctggctaacgtggtgaaaccccgtctctactaaaaaatacaaaagattagccaggcgtggtgggcacctgtagtcccagctactcgggaggctgaggcagaagaatggcgtgaacccgggaggcagagcttgcagtgagccgagattgtgccactgcactccagcctgggcgacagagcaagattctgtctcaaaaaaaaaaaaaattaaaattaaagtttttaaaaaaattggccaggtgtggtgatgcacacctgtagtacaagatactcgggaggctgagggaggaggatcactggagcccaagaagtcgaggctgcaatgagctatgatcacaccactgtctggcagacagagtgagaccctgtcttctaaaaacaaaacaaaacaagaaagaaccccagtaccctttagctatcatctccctcccatttcccctgggttctgacaacccgtcatcattttctgtctctctgcacttgccttttctgcatgtttcctataatggatcattcaatatccggccttttgtgtctggcttctttcacttagcttaatgttttccagcttcatccatgtcaagtgttacagtagctagttaggcacattttttttttctttttttttgacgaagtttcactcttgttacccaggctggagtgcaatggcgtgatctcagctcactgcaacctccaccctccaggttccagcaattctgctgcctcagcctcccaagtagctgggattacaggcatgcgccaccacgcccggatacttttgtatttttagtagagacggggtttcaccacgttggccaaactcctgacctcaggtgatccgcctgcctcggcctccaaaagtgctgggattacaggcacgagccactgcacccaagctctgctcccaattcttgacctcttacatcagatttggcacaaaactgtcccatgccccacatattaaatgatcctatttatatgaactgcccaggcaaatccaataagacacaaagtggagtagtggttgccaggtgctaggggaattgaggggtgatggctgaaggataaggtttctttttggggtgataaaaatattctaaaatgggttgtgatgatagttacccaactctgtgaatataacaaaaaccactgaattgtaataccataaatgggtgaattgtatgtatcccaaaaaagctgttaccaccatcccccaggttctccaaaatgaaacatccttcccatagcgggcatcagacacagaataaacccgagcaggccctgtgtgatcggacttcccctcccatccccagtcccactctgaaccatctcgaacccccttctgcttactctgttccagccacactggccttcttgcaagttctgcctcagggcctttgcacttgctgttccatcggctagaatcctctctctggttaactcggctagcagagtgtgattttgaccttaacaaaaccaatctcccctcccctcccctcccctctcctttcctttcctttcttcttttgagacaggtttcaccatgttggacagactggtcttgaacacctgggctcaagtgatccgtccacctcgttctcccaaagtgttgggattacaggtgtgaaccatcatgctcggcccaaattcttttcttttctttttttttttttttttgggacaaaaagagtctcactctgtcgcccagactggagtacagtggcactatctcggctcactgcaacccagcctcctgggttcaagtgattctcatgcctcagcctcctgagtagctgggattatcggtgcccaacaccacacttggctaatttttgtacttttagtagagatggggttttgtcacgttggctaggctggtcttgaactcctgatctcaagtgatctgccaccttggcctcctaaaatgctgggattatagatgtgagccactgcgcccagcccccagttcttacatagacaccatataagtggcaggcagaataatagcacgccctaaatgtccacatcctcatctccggaacctgtagatgtgttgtcttacacagtaaaagggactttacagttgtgattacagtccgggtcttgatatggggagatgatcctagattatccaggtgggacgaatgtaaccacaggtgtccttatcagtaaaagcaagcggcaggaaaatcagtcagagccagagagagagagactggaagatgctccgcagctggcttgaaggatgaaggatagggttacatgccaagaacaggaggcaacttctagaggctggaaaaggcagggaaggattctctcctagatggtccagacagctctgctgacaacttgattttagcccactgaaacccatttcagatttcattgagaataaaattgtgttgttttaagccgctaagtttgtgataatttgttacagcagcaataaaaaactaacatgctagtttatatttataaaaagaggctgagcaccatggttcaggcttgcaatcccagcaatttggaggctgaggcgggcggaccatttgagctcaggagttcgagaccagcctggccaacatggtgaaaccccgtctctactaaaaatacaaaaattagccgggcatggtggcaggcgcctgtagtcccagttactcgggaggctgaggcaggagaatcacttgagcctgggaggtagaggtggcagtgagccaagattgtgccattgcactccagcctggggagtgacagaataagaccctgtcaaaaagaaaggaaggaaggaaggaaagaaactgacaggggccagggtgttctcagcttgcgaaggatgccaggcataggtgtggccagcagcccccacactctgctctcagtgggcatcgggggccccttaacttcagagggccctagaaacactcaggggtggcttctatcatcacaatggccagaaggccacttctggcacttggtgggtggaagtcaaaagtccatccacttctggagcagcctcacaatgagggattgtcctggcccaaatgccagcagtgctgttgccaagaaacacaaatcatcaagcccagtgcctacatttccaacaaccaccggggcgagcagataaaaatgagggttctggagctacccacctggcttcaaaactggctcaaaacaaacctggcttggctactgactagctacagaccttggtcaagtcgtcttttttttttagatggagtctcgctctgttgcccaggctggaatgcagtggcacaatctcggctcactgcaacctctgcctcccgggttcaagcaattctcctgcctcagcctcctgagtagctgggattacaggtgcatgccaccatgcccagctaatttttatatttttagtagagacagggtttcaccatgttggccaggatggtctcaatctcttgacccgcctcagcctcccaaagtgctgggattacaggcgtgagccgctgcgcccagcctggtcaagtcttttaatgttcctgaaacattcctggaacaatgttctcacttggaaaatggggataataacagtcctgtccttggccggatagagtggctcacgcctgtaatcccagaactctgggaggccaaggcaggaagatcacttgagccaggagatcactccagcctgggcaacagagcaagactccatctcaaaaaaaaaaaacttagctgggcatggtggcacgcacctgtaatctcagctactttggaggctgaggcaggagaatcacttgaaactgggaggcagaggttgcagtgagccgagctagcgctattgcactccagcctgggcaaaaagagcgaaactccatctcaaaaaaaaaaaaaaaaattaaccaggtatggtggcacacatctgtagtcccagctacttgggaggctgaggtgggaggatcaactgagcccaggaggtcaaggcggcagtgagccatgatcctgccactgcactccagcctgggcaatagagtgagaccatgtctcaaaaaaaaaaaaaatagtcccagacttataatctagtgagctttaagtaaggtaagacatgtcaattgcttagaacaatgcctgggagagggtgagtgcccttcagcattagctgagtattgttattttagtagcaagtgcctggaatctaaacccatcaccccttccagcctgggggcccttggtgagcaggagcaggtctgaagagcacctgggtgtctcaccttgctcagcacaatgaggggcgtttgttgactgactgactgatggactgaaggcaaggcatcctaggtatctggttcccaggggagacaggcaagggctcaaagacggcaaggccaggcaggaccacaggtttattggggactccacgcacagacgcttatggcatcacacgacaacggcacggttactcgggacacacacggtggcctctgcccacagccagggcccagaggcagtggggtgcagtctcctcccttgtggcccagacccagctgggtcccttcctcctaggcagctgagggaaggactgctgggttggccacgggcctgggaaggggaagcgagcaggcgagtccaggaggggccggggccggggtggggctcgcctgccctcactccagggactgtagcatcagcagctgtttcagcaccttcgtctggctggtctctcggatttcgccagccaggaacatctcgtccacgaccgtgtaaacctgtgtgaggggagaccctggggtgagacgaggccccccaggatgctggcccggaccctggaagctggggctctgatgcccctcgagctgggacacagacctcagcagaggctccgggtggctagtgcaccacgggtcccccccgtccccctcctctggctccttcagcctcctcttcaccaggagcctaccttgtagaagttgaacaccaggtccagttcacagacattgtggaaatattcgtttaagacctgggagaggaaggcagagatggtaagagatgggcagggagagagccacacacgcacagagatgggaacaaggtcatcagaaagagacagcaaaaaaagagaccaagggggaggcaggggagagagagagacagtgacagggagagaggcaaggagacacacagagagaaacaaaagcaaagatcgatgcaaagagatggcaaaaggtcaggcgcggtggctcacacctgtaatcccagcactttgggaggctaaggcagaaggatgacttgaagttaggagtgcaagaccagcctggccaacatggtgaaaccccatctctactaaaaatacaaaaattagctgggcatcgtggcgtgtgcctgtaatcccagctactcaagaggctgaggcaggagaatcacttgaacctgggaggtggaggctgcaatgagccaagattgcaccactgcactccagcctgggcgacagaacaagactccgtctcaaaaaaaaaaaaaaaaaaaaaaaaaaaaaaagaaaaagaaaaaaaagaaatggagagggagagtcccagtcactgcagagggagggctcaggagggaccagggagggttcccaggccttgggggccactccagggctgcccacccgcctccccaccttacatccctctcccgccgtacctccacgaagttgtgaatggcctccaggtaagccaggttgttgtcattgacatccacacagatgcagaagtagaggccagcatagcggcggtaaatgatcttaaagttccggaactgcagaacagagaggctgtcagcaacggagattgccaggacctaacgtgccagacagagtggggccaaaacattcactccttcactccatacgtggtcccgaggcccagctctgtgcctggccctgtgctggggtcacagcagtgaccgagacagccctaaccctgctcacagtgcagcgggggcaggcatccccagaatggacaggatgggctgtgagagcccaaagagggtgcctaaccccctctgatcctggagagtcaggagggcttcctggaggagggggtatcggagctgagagctggaggataggcaggaatgttctaagcagatagcaaaagcccggggctgggcgggagcctgacgtgttcaatagtgtccatgcaaccttgccactcccttctgtgacttcctgctacctctggagacagtcacatcccttagcctggaattaattaactcaattatttaacaaatacttcctgagcagctactctatgccaggcctgtgataggcagtgtggggaggagggttaccactgccaccaagacgatcctgggtccttgtcctgccctcactgaaatgcgatatacacagttagcaatagtaacacagacacacaccgtgaacaaacatgccaggatcagggacatggattctcattttatgcgcgtgttaagtagacaaagacagatatatatgcatactgggttgcaaagtacaatgtctttggccaaaacctgaaaatccagttcagttctatatgttctcaatgtcaggttcattacaaaaaaaaaaaaaaaaaaaatcccagcactccaggaggccgggcgagaggatcacttgagcccaggagtttcaggccagcttgggcaacatggtgaaaccccatctatacaaaagtacaaaacttagctgggtatggtggcgtgtacctgtggtcccagctactcgggaggctgaggtggggagatgacctgagcctgggaggtcaaagctgctgtgagccacgttcccatcactgcactccagcccgggagaccctgtctcaaaaaacacaaaaaaacagcagctctaggtctggggtgtgcctgtgtcgccacctgctgacagctatgagtgccagcatcagtcttcggcatttttttttttttttttttttgagtctggctctgacgcccaggctggagagcagtggctcgatctcggctcactgcaatctctgcctcttgggttcaagcgattctcctgcctcagtctcccgagtagctgggattacaggcgcgccaccacacccagctaatagctttttactcattttttcagctcaatctcttgttcattgctatactccaagcatgttttcagggttttttttgttttttggtttttttgagacagtctcactctgtcgcccaggccagagtgcagcggcgcaatcttggctcactgcaacctctgcctcccaggttcaagcaattctcctgcctcagcctcctgagtagctaggaatacaggtgtgcaccaccacgcctggctaatttttgtatttttagtagagatgaggttttaccatgttggccaggctggtctccaactcctgacctcagatgatccacctgcctctgcctcccaaagtgctgggattacaggcgtgagcccagcctgagtatgttttctggtgtgattacagtaaggcctacatgtaatccacgggtaaatgagctgacactgatcatcagtgctcctctcttcttgcaatccagcttttctggctctcaccctcctccgcctccagctactgctccatctttccagcctcccttcctgttttaaatttcgaggcttctcagggatctgctgcagacccccatctctcctccagctacattctctcagagaagcacattctctcatcctgcaggctggggcaggtgtcccctctgaacatcccacgccactgccccacccctgccctgccccagcctgaccactgctggtcgccactgtctggggatgggtctgtctccccattggactgagcctgtgggggaagctggagctgtcacactgtgtcctccatgttgccctgcaaagggctggcacaggtaatggcccccaaagacatccacatcctaatcccacaccctgtgaatatgggaccttatatggcaaaaagggactctgcagtctcaacttgtgacgaagttaagaagcatgagatggggcgataatcctggatggttcaggcgggaccaatgtcctcactgggctgctaataaaggaaagcgggaggcgggacagtgcgagtcagacagagattggacgacggccaggtgccgggcctcatgcctatcatcccagcactttgggaggccaaggcttgatctcaggagttcaagagcagtttaggcaacatatcaagacccatctctataaaacatacaaaaaattagttgggcgtggtggcaggtccctgtagtcccagctactcaggagtctgaggtgggaggatcccttgagcctgggaggcggaggctgcagtgagctatgattgcaccactgcactccggcctggggcacagagtgagaccctgtctcaaataataataataataacaagagggatagcccgcatcttccagttgcctactcctccctttgatcttcactcacaagtcccctccaggaagccctccagacccccaggctgggtcaggtgccctcccccagccaggctcctcgatcccagccctgcctactgtggttgtcactgtctaggacaggcttgtgttccttcctgggctatgagtcccaaagcagcacaaggctgtctcagtgctgctgtgaacctagcactgggctgatcacagaggaggcacacagaaacattaggtgaatacatgcacaaaggaacaactgaatgaatgggcgggcctggatcctggaggcatggaggaactcaagacctgagggtcagcctcctctgtaacattctcatttgcccagccggactttccggctgcccctgtatcattgggcctcactgacccctcccgcgccccagccctcagcacaggaccagccactacattagcagcaaggtgcccacacagccagaacacccgacacccagttcctctcccccttcccacctgctgctcttggtgacaccaccagtgacctcctcctggagaggtaagtccaaccctgtccccctcctggctgctgggacacccaatctcttggttctcctctccctcatctctctgcctgcagacgtggccctctggtgctctcctcggtctatcctcacttccccggtgagctccttggcctcggtttccctctatgtgcagaaatgccgtttccatatcctacccagctctctccaagaaccctgactcgtcacttcttcctggacatctctgctgggatgtggacgatactcggggccagacccccaacacttccctcctgatcttcacctccgcctgcccttcccatctgcccatatcagataatgacagctccatcctacccgggggctcaagtgggaaatctaattgtcgccctggctctgctttctctcacattccacatccaattcttggccattcagctgggtccacctccaaaacgctcctggccacaccgacggcttccatgctggtccggtcaccagcatctcccacctggaccactgcagccacctctctccgagcagtctcctctatgctcttgccctatagcgcagcctcaagtcggccaatggccatgctctgctcaaaaccctccatggttcaagaccagcctggacaacatagcaataccccatctctacgaaaaatttaaaaattagccaggcgtggtcactcatggctgtaatcctaggactttgggaagctgcggtgggcggatcgctggagctcaggagttcgagaccagcctgggcaacatggcgaaaccctgtctctaccaaaaatacaaaaattagtacggcattggtggcacatgccaatggtcccagctactcgggaggctgaggtgggagaattgcttgaccccgagaggcagaggttgcagtgagctgagatcgcaccactgcactctagcctaggtaacagagtgagaacccacctgaaaagaaaaaaaaatttaaaaattagatgggcatggaggtgcatgcctgtagtcccagccacttggcaagctgaggtgggaggcttgcttgagcctgggagggtacagtgagctgtaattgcaccactgtactctagcctgggagacagagcaagaccgtgtctctaaaaaacaccaaaaaacaaaaacaacctttcttttttttttgagaggagtcttgttctgttgcccaggctggagtgcaatggcacgatctcggctcactgcaacctctgcctcctggattcaagcgattctcctgcttcagcctcccgagtagctgggactacaggcacccacgaccaggcccggctaatttttgtatttttagtagagacgagatttcatcatgttggtcaggctggtctcctgaccttgtgatccacccaccttggcctcccaaagtgctgggattacaggagtgagccaccgcgcccggccggcaaaaacaacttttctacggctcccatctgactcatagtaagagcccaagtcttccctgcagccctgcaccaagagattaccctgttatcttctctctttcatctcctccccttcctggctgcattcctgctatccctggaacgccctaagtattctcctgccccagggactttacacttgctgttcccttggcttgaaatgttcctctcagacattggctccttcctccccgtcaagtccttcaggtcttggctccaatgtcaccttttcagcaatgccatcctaaccaaaccatttaaacctgcatcctggctgggcgcagtggctcatgcctgtaatcccagcactttgggaggccgaagcaggcagatcacttgagctcaagagtttgagaccagcctgggcaacatggtgagaccccatcgctaccaaaaatacaaatattagctgggcttggtagtgcacaagcctgtagtcccagctactcaggaggctgaggtgggagggtagcttgaacataggaagtcaaggctgctgtgagccatgttcgtgccactgcactcccgcctgggtgacagaatgagctcctgtttcaaaaaaaattttttaaagagggacaggcatggtggctcacgcctgtaatcccagcactttgggaggccaaggcgggtggatcacttgagatcaggaggtcaagaccagtctgaccaacatggtgaaaccccatctctactaaaaatacaaaaattagccaggcgtggtggcgagcacctgtaatcccagctcctagggaggctgaggcagagaatagcttgaaccctggaggaggttgcagtgagccaagattgcccccattgcactccagcctgggtgactgagacagactccatttcagaaaaaaaaaaaaaaaaaggcaaaaaaggccaggcgcagtggctcatgcctgtaatcccagcactttggaaggccgaggagggtggattacaaggtcaggagttcgagaccagcctggccaacatggtgaaacctcgtctctaccaaaaatacaaaattagcctggtgttgtggtgcacgcctgtaatcccagctatttgggaggctgaggcaggagaattgcttgaacctgggaggtggaggttgcagtgagctgagatcatgccactgcactccagcctgggtgacagagtaagactctgtctcaaaaaaagtaattaattaattaattaattaattaattcaattcaatcaaataaaaaataaagacaaggtcttgctacattgcccaggctggtcttgaacacctgggctcaagcaatcctcccaccttggcttcccaaagtgctgggattacaggcatgagccactgcacctggcctattctctctacttttctgtgtttgaacattctataggaagtttgaaaaacgcaccagcaaaaaaaatttgaccaaaaaaaaaaattcttttttaatcgtaggcaaaaaaaattaataataacaatgcagaacaaaaaggcaaaatattaatactgattaaatctgggtagtaggtatacgaatctccaatctacttttctttcattgtactaatctgtatgtttatgatttttcacaatgaaaagtacaagtaaaggaagggaagaagcaagcaagctcaaagcaggttgagtgaatgatataggatggatagagggtccaaggggttcttgcaactagaagctgggcagggagtggcgaagtagggcacgaggaagcagcggggtgcaggaggcatggagcgggcgtcacctccacaaagttggtgtgtttggcgtctcggacggtgaccacggcatgcacctcctcgatcagcttctgtttctcatcatcatcaaactgcatgtaccacttggccaggcgcgtcttgcctgcccggttctggatgaggataaagcggatctgggggcagcaggaggagaaggaggaagtgagagaggcagagagggcgggttgggtgctgcccaacggccccacccatccacccagaggggagatagggctcagggcctccctgctgcctgacttccaggggtctcggctgctccccagacccaagccaggccggcctggccacacgcttcatcccgggtccctccagcacccctgtggagtgacttcccttccacaagtctccaactctggagtcagctccagggccccgagtcccaggctcctccaccacctcttatctctctctgtttttttttttttttttttttgtagagacagagtcttgctacgttgctggtctcaaactcctggactcaagcaattctcccacctcggcctcccaaactgctgggatcacaggtgtgagccactgtgccctgctttgtctgcccctctaggcctgtttcctcaccagcaaaacaagtctcccaagaagattcatctcaccagggtggttttttcattatattttttgttatttttaaattttcagacagtgtctcattctgtcacccaggctggagtgcgatggcgcaatctcggctcactgcaacctccgcctcccaggttcaagcgattctcctgcctcagtgtcctgagtagctgggactacaggcacccgccaccacgcctggaaaatgtttgtatttttggtagagacggggtttcaccatgttggccaggctggtctcaaacttctgacctcaggtgatccgcccgcctctgcctcccaaagtgtggggttataggcatgggccaccacgcccagtcagccagggtttttttaaaggttaaaaaaaaagtttataaacttagttcggtggctggtaggtggtagatactcaataaacatttgaggttcagactcctttgggctaagtctcagctctgccacttctttttttctctttgcttcctaactttttataaaattgaaatgtaattcacacaccataaaatccatccacttaaaatgtagacagttaaatggtttttggtatattcacttagtatatattcacagttgtgtaaaaatcaccacttttttttttttttttgagacaggttctagctctgttgcccaggctagagtgcagtggcgcgatcccgcctcactgcaacctccacctcctgggtgcaggcctcccaggtagctgggaccgcaggtgcacaccaccacgcccagctaactttttgtatttttagtagagacagtgtttcaccatgttgtccaggctggtctcgaactcctggcctcaagcgatccacccacctcatccccccaaagtgctgcatcaggcgtgagccactgcaccccacctaatatcaccactatctaatttattatctaataccagaacattttcatcatctccccccaaaaaactccccacccattagcagtcactctccgttcccccagggcctggcagccacgagtctcctttctgtctctgtggatgtgtctgttctggacattgtatatgagtggaatcatgcactctgtggctttcgtgtctggcttccttcactcagcgtgacgttttccaggctcatctgtggggtggcaagcggcagagctgcaattcctttccgtggctgagtgatcctctgttggatggataaggccgtacttcgggcatttgggttgtttctgctttagggctattatgaataatactgctatgaacattcgtgtatgagttttcgtgtggatggatcatttctcttgggtatatacctaagagtgagattgctggctcatagggtaacgctatgtttaactttctcaggaattgctaaaccgttttccaaagcgtctgccactttcatgacttaactttggtgccactttggtgcctgagtttactgtgaggagtaaaggatattcctggccggtcacggtggctcacacctgtaatcccagcactttgggaggccaaggcgggcagatcacttgaggtcaggagttcgagaccagtttggccaacatggtgaaaccccatctgtactaaaaatacaaaaattagccaggtgtgatggggggcaggggggaggcggctataatcccagctactcgggaggctgaggcatgagaatcacttgaacccaggaggcagaggttgcagtgagctgacattgcaccattgctctccagcctgggtgacagagcgagacgctgtctcaaaaaaacaaaaacaaaaacatagaggtatagtacagtgactggcacgtactaagtgttacataagaaccagctcttagcagcattatattttccattatgtgatgttcagaaaaccatggccaaagcttactccattagaagttctgggcccatttctgtctgagacaggcatgctcatgcccattttatagatgaggaaactgagatttagggaaaggaagtctcacagccagaaagcagaggtgggagtccaaaggctttgctctgaaccacctgaccccaacttgtgggagccttctctcttaggaaagagagccctctagtcctgtctttttcttttcttttttgttttcagacagtctcactctgttgcctaggctggagtgcagtggcactgtctcggttcactgcaacctctacctccaggttcaagcgattctcctgcctcagcctcctaagtacctgggattacaggcgcatgccaccatgcccggctaatttttgtatttttagtagagacagggtttcaccatgttggtcaggctggtctcgaactcctgaccttgtgatctgcctgcctcagcctcccaaagtgctggggttacaggcgcgagtcactgtgcccagccttttttttttttttttttttgagacagagtctcactctgtcgcctaggccagtggcacaatctcggctcactgcagcctctgcctcccgggttcaagcgattctcctgcctcagcctcccaagtagctgggattacaggcatccaccaccacacctggcttatttttgtatttttagtagagacggggtctcaccacgttggccaggctggtctcgaactcctgaccttatgtgatccgcctgcctcagcctcccaaagtgctgggattacaggcatgagtcaccgccccagcctgagagtctttcctaagcctcattctccacacactctatcctccctcccccaaccaaccaaactggaccggaacaggatgttacactctccttccaagaactcctgctgagccagggaaaaccacttcctagcagggcaggggtcccaggcaggaagggacgttggggggcctacaccaggcagccacagcctgggagcagagccggagacatattcacacagttaggagaactagaagcaaacccacagagttgacaaaaagctctgcctcttactcccaaattcccttgtatacctctccctgttttcttcccatttggaatctcaagtcccctccgtcctgaatctctgcatcctcacgcctctgctgtcccctctagatgccccccaaccttccctgtctccaatccccctcctctggagttgttcccttttgacctccactttctcagtctcagttcccctccttggggcctcaatgggctttttactggtgacatcccttgtcccactcccaagcttcctcccttcttcaaaaggtcacattttgcctccaaggaccctgttcctggaggagactccgcccccgctctgacactctttctcattcgttttctttcccaacttccagcccaaagaaccctttcctagatccaaagccccaacctgggggataggggcactcctaaatccaatgttgagtctttgccccaacaaagattcctccccaggtctcacactttcaagcctactccccaccccacaagatctctcctcttggaaagacctattcagttgctccccattctttccgagtgtccatcttacctccaggtcctctctccttttacagcgctttcccagacccttaagtttcattccctacagttgcctccttttggtttcctgtgccaggtctcttcttgagatcatccctctctcacaggcagtctcctgcccctgtctcaacatcccctctccacctgcaatcagatccttgtctctagagactcctcccatcaagaaaacctccctccccttttccaaggtctcgcgttctcgtcccagcgctcccgccacacttccagagcgccttcctctttcggacgccctctccccacctccaatgccttctcgctacccacaagactgtgtctcacgagtttcctctcgtttcaaagcttccaaccatctacaacgtttcccacctgcacagccctttccccttggaacaccacccccaatgcccgtcgccgcgagacccctggtaacccccgcgcgcagaatcaccgccctgtgccctccttcccggccctggatcggtcccaatccccagagcccgcgcctgacccagaccatccgcggcagagaagggacttgtcagcgcccgatccagcctcggctatttacgcgtgggccccccctccgccagtccccggcgtagcgctcccccgttaccatggcgacccccgtccagaccccagcggccccggtcccgcggcgactgggcagctccggctcagggtgcagttgtagggcccagagctagagcggacttccggtagaaaaacccgcctgccttctcgcgcacagacccctgggagttgtagtttcaccaaaggggccagcctgggtgaagatgggtgaagagtcagagccagtccttttcctaccaaacgagtcagatcccaagtgcatgctgggatttgtggacaaacatctttacagaggactacaattcccgagatgctgaagaaccagcggtgaaggcgttgcattcagggaaatgtagttctcttaggtcccctccccccacccaggggagaagggcatgctgggaatagtagttttaaattttaaaaaactgtcctggggagatagaaaatgtctttccattcctcatccagtgatttctttaatttttttaaaaatagagacaggggtctagatatattgcctaggttgatctcgaactcagcttcaagcgaccctcagccttccaaatcaccaggattacaggcatgagccaccacaacaccaagccagtgttttgcttaaaatacgttgcgtgtgtctctcgggagacaacagtttaaaagcataaatttgaaccggcccggcgcggtggcttactcctgtaatcccagcactttgggagtccgaggcaggcagatcacttggttaggagttcgagaccagcctagccagcatggcgaaaccccatctctactaaaaatacaaaaaattagccaggcatggtggtgcgcacctgtagtcccagctactcgggaggctgaggcaggagaatcacttgaagcccggaggcagaggttgcagtgagcccagatctcgccactgcactccagcctgggcaatagagagagactccaaaaaaaaaaaaaaatctctagtttggcgggggcatgatggcccatgcttgtaatcccagcactttgagaagctgaggtgggtggatcacctaaggtcaggacttcgagaccagcatggccaacacggtgaaaccatttctactaaaaatataaaaattagctgggtgtgatggcaggtgcctgtaatcccagcaactcgggaagctgaggcaggagaattgcttgaacctgggaggcagaggttgcagtgagccgagatcacaccattgcaccctagctggaatgacaagagcgaaactctgtcaaaaaaaaaaaaaaccctccaggtcagcagttagtttagtgtttttttggtgtgtctttgtttttgcttttttctgaaagagggtctcccttggtcacccaggctgtagcgcagtggcatgatctcagctcactgaagcctcaacctgctgggctcaagtgatcctcccacttcagcctcccgagtagctgagactacatacacatgccgtcacacctggctaattttttgtactttttgtagagacagggtcttgctatgttgcctaggctgctcttgaactcctgagctcaagcgatcctccctcctccacctcccaaagtattgagattacaggcgtgattttttaaatggcctttattacattttaaaaattattttatttgccctatgagtatgtgtgtatgtttgtctagatctctcattaggtagtgagttgttgagggcagggaccctgtctgataactgtatcttcattacctagaacatgacagatggtaagcagtcaataaagttattactattagtactgaggggagattggccctaataagaacaaagcatgccaggcatggtggctcactccagtaatctcagcactttggaatgccaaggcaggcagatcacctgaggtcaggagttcgagaccagcctgcccaacgtggcgaaacagcacctctaataaaaatacaaaaattggccgggcttggtagcacttgcctgtaataccagctacttgggaggctgaggcaggagaagcacttgaaccctggagatggaggttgcagtgagccgagatcgtgccactgcactccagcctgggggacagagagagagagagactccatttcaaagaaataataataataaattaaataaataaaacaaaatgtattgtagaattatgtaaatttaaggtatagtactggcagaataaccaacacatagttgttgaatattataggggcaaaaagaggccagagatcatttctgtcttgtgtacttttctgtctccaacagggttgatactaggatgacacaagcaaagtgtccaggttgcaaaattttaaaaggacctcactcttagatgccaattcctgtcttacacaggactgagaatatgtgcctcattaaattttgtgccctcaacacgtcacttgcctccccttagtcccagtcctgatctccagtgttcaacttaatacttggcacaactctggtgttcaataaacatttgctgaatgaatgaatgcatttgcagcaagaaaacagacactgcccccaccctcacagcattcacagtctagcaggaaaaatggacttaaatgacataacataaataaatttaaggccaggtgcagtggctcatgcctataatcccagcactttgggaggccgaggtgggtggatcacctgaggttgggagttcaacagcaacctggccaacatggtgaaaccccatctctattaaaaggacaaaaattagccgggcatggtagcgtgtgactgtactcccagctacttgggaggctgaggcacgagaatcacttgaacccgggaggcagaggttgttgtgaactgagagtgtgccacttcactccagcctgggcaacagagtgaaactctgtctcaaaaaaaaaaaaaaaaaaaaaaaagaaggccaggcagagccaagtggatcacctgaggtcaggagctcaagaccagcctgatcaatatggtaaaaccccatctctactaaaaacacaaaaattagccaggcatggtggtgtgcaactgtagtcccagctgctagagaggctaaacaggagaactgcttgaacccaggaggcagaggttgcagtgagccaagatcgcgccactgcattccagcctgggctacagagcgagactccatctcaaaaaaaaaaaaaaaaaaaaaaaaaagatattagccagtgctacagccacgagaacactatctttttttctttctttcttttctgagacagggtctcgcactataacccaggctggcatgcagtggtgcaatcacagctcattgcagtttcaacctccggggctcaagcaatcctcccacctcagcctcctgagtagtgggaactacaggcacgtgccaccatgcccagctaatttttaaattttttggaaagaagaggtcttgctatattttccaggctggcatgtgaatgcttgactggagctgaaggacctgtattccaggtggctcgctcctgtggttggcaaatgaatgctggctattggccagagacctcagctcctcaccacgtgaatctgtccacaaggacatatgaatgtcctcacatggcagctgttttcccaaagagtgagtgatctaagaaagagcatggcggaagctgctatgtcttttatggccttgcctcagatcttttatgacactgtcatttccacaatgttccattggtacctaatcagccctgtccaatgcaggaggcaatgcaaataccaggtgagactcattggggtccatcttggaggctggctgccacaatggctcataacaggcacctagctgagttgaagagttagtgacagcttcctagaaggggtgacatttgagctgagatcagaaggacgagtggagccgggcatggtggtgcatgcctgtaatcccagctactcggaaggctgaggcaggagaatcacttgaacctgggaggcagaggttgcagtgagccgagattgtgccactgcactccagcctgggcgacaggctgctccgtctcaaataaataaataaacaaacaaataaataaataaataaataaaggccaggcgcagtggctcatgcctctgatcctaccactttgagaggccaaggtgggcggatcacttgaggacaggagtttgacaccagcctggacaacatggtgaaagcccgtctctactaaaaatacaaaaattagttgggtgtggtggtgcacgcctgtaatcccagctacttgggaggctgaggcaagagaatcgcttgaatccgggaagcagagattgcagtgagccgagatggcgctgctgcactccagcctccgcgacagggcaagcctccttctcaaaaaaaaaaaaaaaaaaaaaaaaaaaaaaaaagacgagtggaaattaaccaagcaaggattagtgtccaggatggggcagagtgctgggcagaagaacacaggtagggagaagatcaaaacattttctctaccctcaggagtctcatggcttgagtggtttcgagtctggggctacatggcacagacatagaaaagataagtcccgaaggaacaattatttatttttttattttgctagacagggtctggaactcctcctggcctcaagtgatcctcctcccttagcctcctaacgtgctggaattacagtcgcgagccagcgcgcccggcctcaattttaaacgtttataaagatagagaggttgtggcagggcgcggtggctcacgcccgtaatcctagcactttgggaggccggagcaggtggattgcctgagctcaggagtttaagaccaccctgggcaatatgacaaaaccccgtctctaataaaactacaaaaaatcagcgcgcctgtagtcccagctgtttgggaggctgaggcacgagaatcgcttgaatccggaaggcggaggttgcagtcaacggagatcacgccctgcactccagtctggacgacagagcgagactgtctcaaggaaaaaaaaaagagagagagagagaaagagagagaggttggctgttcgcggtggctcacgcctgtaatcccagcactttgggaggccgaagtggaccgatcacttcagcccaggagttcgagaccagccggagcaacatggcgaggccctgtctctacaaaaaatataaaaattagccgtgtgcactggcgcacgcctatagtcccagatactccggaggctgaggtgggaggatcccttcagctggggaggaagagcttgcagtaggctatgattgcaccactgcactccagcctgggcgacagagcgagaccctgtctcaaattttttttaaaaaatagatgtttattatgcattcatccagtagatatttagtgcgtcgatctactaagcaaggggcccaggcactgggattccgcggtgaatctgagcatccccgcctcccgttcctgcctcgtgattggctgcccttgggccaatggctgaagagtccaccgctctgccagcccccgcggcaatcctccagctgcagcttcccctgttcggtttgcaggcggcgctgtgggctcactgactcctccgtcacacgcagacctggtccccaccctctctgattctttcagactcttaggaatgaatagagtgtataccccagagtcccaccctctttacaaaatccttttgtgaatttttctgcctgtgcaggtttccaatacaggtccagaatcccacgcccgcctcttatcaaccaacaccagcggctctcccgttaatgtgacctccagccattcggcccgtaggccgatgcttgggaaatcttgacagcggcccaagccggcagtcggcacttctctcggtcggttaattgtttactcgtttgtttatttatcctggagtggaggctagccgggtgcgcggaggcggctgcccccagggaagcccgcttcctgtggttggcttgctcaactactatccgccctcttgcgcactggaaaaaattgcagagctgggaatgcaccccttgatggttccgttcatgcagtaaaacaatgcctgggcccctgccttgtgcctggatccgtgctagggacatcgacgatgactgaaacagccctggccctgccctcaggggccttgcagtccgatgggaaagacctatcaccagatatggaccacccaaggtggccagggcttggacgggagacctaaagggactgtgggagcttggaaggagcagctgacccagcctgttgcatcagagaaggcctcctggaagaggggacatctgagctagcatctcaaagaaggctagaaggacaaccatgtagtctctggctaccatgtccccagtgcctaccacccccttgtttagcattggatttttttttttttttttttttttttttttgagacggagtctccttctgtcacccaggctggagtgcagtggtgcgattttggctcactgcaatctccatctcccgggttcaagcgattctcctgcttcagcctccctagtagctgggattataggcgtgcaccactatgcctggctgatttttgtacgttttgtagagacagggtttcgccacgttgtccaggctggtttcgaactcctggcctcaagcaatccacccgcctcagccttccaaagtgctgggattacaggcctgagctactgtgcctggccgactcattcacttttatttattaacaagttttaattgtgggtcattggccagactttggaactagccagggtcccctgccttcagagggctcacacataaaatggtgataccaacacagaacttcatttaatctttttagagacagggtctggccttgtggcccaggctggagtgcagtggcacaatcatagctcactgaagccttgaactcctgggcttaagtgatctttcttcctcagtctcctaaagtgctgggatccaacacagaactgcaaaccttgaaccctgaagaaatgctacgtgtagcaacgtgacccaattgtctgggtttgtgtctcaaacctgctgcttactagctgtgtaacttttctgtaccttataacttactcataaggttgttgtgaggattcagtgagttaatgggtctaaagtgcttttagactgctgcctggcatgtccaggcatggcggctcatgcctgtaaactcagcgttttgggaggctgaggcaggaggcctgcttgaggccaggagtttgagaccaccctgggcaacatagcaagactccatctctaccaaaagaaaaaaaaaattggccaagtgtcatggtgagagcatgtagttccagctgctcaggaggattgcttgagcccaggaagttgaggctgcagtgagccatgactggtccactgcactccagcctgggcaacagagcaagaccctgtctcaaaaaaaaaaaaaaaatccacacacaaaaaaaaacaaataaaaagaatgttgactagcctggccaacatagtgaaaccccgtctctattaaaaatacaaaaatttgccaggtgtggtggcacacacctgtagtcccagctactcgggaggctgaggcagaaaaatcgcttgaacctgggaggtggaggttgcagtgagccgagacctcgccattgcactccaacttggatgccagagtgagactccatctcaaaaaacaaacaaacaaacaaacaaaaaagactgttgcggccaggctcagtggctcacacctgtaatcccagcactttgggaggctgaggtgggtggatggcttgaggccaggacttcgggaccagcctggcccgaacaggtgaaaccctgtccctactaaaaatacaaaaattagccagatgtggcgcctgtagtcccagctactcaggaggctgaggcagaagaatcacttgaacccgggaggtggaggttgcagtgagccgagatcacaccactgcactccagcctgggtgacagaacaagactctgtcttgagaaaacaacaaaaacaaaaattagcggggcgcacgctggtaatcccagactctgcctcaaaataaaaaataaaaataaaaaaagactgttgcttggcacgaagtactcatttttattattaaagaacgagggatcaggccaaatctgggagactaccctgagaaggtgacttcaagctgagagttgaagggtaaatcagagctgatgggctcccaaggggtttgggggatccagagtgagcccaagcgtccttgttctccagatgctgccagctcacaaatttaagattgaaaagactcggaacactgcataggcgttgtaaagacattaatttgaaatacaggtatcaggaattcactgccccccaccttgtctttcctgtgtctcctcaagtaatctcaaaagtcccttacacatcacggtttgtaatgacagtccacgcactcgatttggcagccccgcagtgcttaaagaaaagttgttgttgtttcaagccactaacatctaaaaatcagactgaatgcattaaaagtgcctttttttttttttttttgagacggagtttccctctgctgcccaggctggagtccagtgctatctctgctcactgcaacctccgcttcccgagttcaagcgattctcctgcctcagcctcccgagtagctgggattacaggcgcccgtcacgacgcccacctcatttttgtatttttagtagagacggggtttcatgttggccaggctggtctcgaactcctgaccgcaagtgatccgcccgcctcggcctcccaaagtgctgggattacaggcatgagccaccgcgcctggccctaaaagtgctacattaaaaaaaaaaaaaaagtcaatggaaacatcctttaatataaaaatctttattaatggaataaacaagcccctgtaattttatttatcaacgcttacagagcgcttactatgtatgcaatgcatgatttcaagagctttgcaaaatataatctatttaattttcacagcagccctacgagagaggtacgattattatcccattttatagatgaagagactgatggcagaaatgccaaatgtaataggaaacagcctttcttcatgcattccacaaatattggctcggcgcccgggaagctcatcttccacgatctgtacttccggaggagtcccagaggaacacctcctcagttcagaggagtcaagggttacagcggtgccctctcccatcactactcttttcccttcaggcgccctaattgacattcgatttgtagccatttgcacaatgctaagtgacaggcttgggctgcacacaggaccaggccgtcttccctctcctggggatcagtcgttcacagaaccaaaaacaagttgcatggacgcgcgcgttggctgcagattttcttcacagccaggagaaagagcacgcgctctccagccccgcctcttcttccgggacgacgaattgcggggctcggattgggctgaggcgggccacgcctcctcatatcctccaatcaactccctctctggtgcgctccctccttctcagccccgccccaccgccccacgttacgtcgctccttctggcctcctccgttatcccggcggctgcggctcgcgcggcaaacccacctcccattgcttcccattggctggtcaggtcccgcgcgagcgggatcgcgcccttcgccccccacccccaaaaccgggccatgcctctctccttcggctttctccaggagccagcgcgaggcagtagatcggctgcttgagacgcgcgcgcagctcctgcggaccactccctccgccctgcgccagcagctgcgccggctggcagccccccgcgcacgcgcgctcgcccatcccgctccctctgctcgtttgcaagtcgcctcgcgctcagtcgcgacggcggccgccgcaatagcggcattttcgggggcgcacgcgcactgcaccgtccgcggccgttcctaacctcaggcagcggctgtggcagtaagcccctcgggtgcgcacgcgctctgacctcttcccactgcctcgctggttgtcccttcgcggcgcgcgcccaggggccgttatacccctgcaacggtccacgcgccgcgcacgcgcagtagcgagggggcgcgcgcgcgggagcggccgtcgcaggaaggaggtgccgccgctgccgccattgcgagggagggagggagggagggagtgagcgaggctggtccgccctccccctggttgccgcccctccccccttcccctccccgccccccgccccgagggagagccgcggcgcggcggcaggaggaggtggaggaggcggaggagggaacccgcgagggagggtccgcccggccccccgccgccggagccgccgccgccgcctcagccgccgctggactaggagcaggggaacatggcgccggggcccccgtcgttgctgccgggattttggaggccggggccgcgctgagggcgcccagctggtgagtgcgcgagctcacgggccccgggcggcgaggccgggcgccgccccgctgcggggtccagggggaggcggggacggcggggcccggagcccgcgaacaatggaggagctggagggggaggggaggagcggccccccccccagccccccgggccccgccgtccccgtcgcttcgcgcgtcggcccggcccgtggggccctcctgccctttggacctgcccctgcccgccccagccctgctgtccccgccgccgcccccatccccgacccgttgggatctcggtgtctgcctcggagcctacccgacttcagccaaccggttcccaattctgcgccccccttcccccttccacccctccataatgcccttcgctcctcccgggctctgcagtgctcctgggacccatcttctcctcattgaccattctgcatctcttaattgtggctcccacttttgagatccgtgacgcttctccctcttctcgattctgctctcaccacccttcagatctgtcctcggccccttctttgacctaccttctgtgctattattcctgtctcagaatctgttgcaccctgggagctgtccctttaggacctgcggttccaaccctttggagatccatctgagacccctgttcggccaggcactgctgccccaggtcttccccttggactgaatcccgttccctcgtgggccctactacccgcatttcttgtctgccctctcgcagagcctgctgcaccccgggatgcccctcggctggctttctgacccttccgtgccccagctcattcccctgatcccctcggacttggctgcaccgtgcttgcctgttccccttctcagctcttgttcccgtttaccattcagaccctttcctctcttccagacctttctgcctctcagctctgccccttgcccgacctcagatcttgctgcgctcccctcacctgcttgcttctgactctgccttcccgggaagcagcctcctcccccttctctgactctgcaggtctcccatttctgctattcacttaaatgatgtatccctaactcagactgccttcagtttcagcccgtgttctcttggaggtttcctctcttccccacctcctttttggcactcctctgagctactgcattcatttgcttctcctttctttggcctgtctctccttcagttctctgcctgaaaactgcttcctgtcccctctttgctccaattcctctcctccccgttttagcccttagacatgccctttaacctcactatacctctgatacctcccgggctggtcacccatccccttcctgttctgcatctcacagacctgcccctagatccattttgtacctacactttcttctcgtttttttcaattctgctccatcctctttatttagtgtttccctccccagctcggctccttcggagctgtccacttgcccgcatatttttagaccggtttttaacttctgtattgccgtcctttcttggagcggtcctttaacactggggttcttgtcactgtgtcccctctctgttccctcccgagtcttttaagttttccacatgacagtctcttccccccaccattttgattcagccctcacccttcactctgctttatttgcccaccctccactgttctgcctcttgtcttcttttggagttctcactccaattgtgacattacgatgtcttcttaatcattctttcctatgtattcccccccaccttcctcttggagctgcctcagtgctgtgatagattatcactcccctttgatatccctctcccaattctgttcctcttggacttgtttccttcctcaccttttttttttttttccttccccttgtatcctgccaggctccttctcttcccatttagttcctatcagacctgctcctcgcagctcaccacccgtggcccacccattccccattgagcacttcccctttcaggcatatctttctttccatccctctgctgcagaggcaaaggggctggattgggccttaggctctccaggctctgagactgcagattctctctctgcgccctaaccctgagggttctctccccagggatcctgagagatctgggtaaataggtgggggttggttgattgttactactctctggagtctgggagtgtctcccccatttcccccacttccactaggttagtagtgtggggggaggtagatctttttccattgccccattttctttcctctgctgtttgctctctcccttcctatctctgggctttgcagctttgtgtcctttggaaaaggggattgcagctgctcgcagatctttattctctttctcactttccctccttccttctctgagccattgcatagagtaccctctctccccttccacctctaagccagcaaccctaggagtgtccttcccttcccccccgccttcgcccctcccccccagctaacaagttatttcaatatatagttttacctctagctggggaaatgccagttctcaaattatcccgatcccaccaggggttatggccacagttggacctagggaagctacagtattgccttccctaatggcctctggtttgcagtgtgaccttgtgggaggggatggggaaggtgggcttatttctttttcatctttgccccgggaaaggctccagcttcctggtcttcaaaatggtgagggcttgggtttggaaagcactttgcggttgtttgttgaaagagagagtgccaaatgtcactcagatttctgccctctggtattgcaggcactccctgccacaggagctgagtgcctctgggcagatccatgctagattctggggctctttgcctgccgtacaaggggtgtgtgggtgggccctgacattccttaagctttttgagtgacctgattgggtagagttagaaaggggtgccaggaactggcggatgtgattggatttttagtcttattatctgagaaatgcgtcttggctaccattcctgagcgattttctttaatgactctatggttgtgggggggtatttagttcattcaggggtagaggtggtttttacagaaaatctgtccaaccattttccttccttaacttgggaaaggggatcttttgcatgttctaggtttatttattttatttcttaagtaaatcaaaagcctgatttttttccctgctgtggcctagggcaattgtatattaaagtagccatccaactgtgaaggagcatttactggaaggactttcttaactgtgctatgatcaaactttgtttattttagtacttatttagaaataattctgtgtggacacatttgaaataaaaacattcactgtcatctacagagttggaccattcactcatcaaatattagggcatttgtatatgagacagtgaagagggctgatagtagatttgtatggtcccttgaactttttaaaattttctgacagaatctggtaattttaataatctatgtatggcatgggttttcaccattattgacttaaagatttttggttcatttccgttggtaaatttttagccttgtgtgtcatgattaattttctgaatttatcttagagtttgtgttacccatgttggtgtcaatagttgttttgttttttattaatatggaagtgacagataattaagaataaaaacaactgtgtatgcagtactgcttaaatgtgtgtcccagagttttaatatcattggcagcatgaaaagttcctgcatgccaaaagcctaagtttacataatagggagagaggacacacagaatagagagctgatttttccaccttaactggtaaccgatgttcttaaagactgtcagatttctctgaggctagcagaggccctaactccagcattgccatttgctttcatgatgggattgggtgctacagaaatgtgaggtggtagccttggccttctggcacagttaatatgccatttggagtggggggactggagcaggagatggcggtagacaactgctttcaaggtagtaacatgttttcaagggctcttgccctgcctagaaaatctttgtaaagacttaaaaactaatctgatcaaagttcctcatttaagttatcatcttgttttcaactaacctctttttggccatgctccccacccgcccttttacctgcccgccattttccttggcatgatgaaggtcgatgcatttagaacagtgacaaatcagaaaatactcattcttattgatccagaagagaagaagttgaaagaagttgtcggtgtgcagattcatgggcagatccatggacctgatggtgacttttggcaaaggacacagcctgggaagggtgggggttgcacaggtgacagtaaaccatagcctaatagatgtttggtgagtctgcatgtgaggaggtgaggcgtcaggtcaatatagttggagattgaaaaggtcggagtggttgttcgtctccatctagtctggtctgcttcccaactttggtccactgtggtctcctgagaggtgttaggccgcttgcagcgtcttcctgtgatctgctgtgacttttgtcggtcaccacctggcagtctaaacaatgtcttgatttacacagtaatcgtgactttttttgagatggagtttccctcctgttgcccaggctggagtgcaatggcgcaatctcagctcaccacaacctctgcctcctgggttcaagcgattcttctgtgtcagcctcccgagtagctgggattacaggcatgcaccaccacgccaggttaatttttgtatttttagtagagatggggtttcaccatgttggccaggctggtcttgaactcctgacctcaagtgatccacctgcctcggcctcccaaaatgcagagattacaggcacgagctactgcgcctggcctgtttttcccttttttaaaaaatcttttgttattcatcacagcactatccatgatgtccagttggtaagatttctttttcacgatctgtaaaataggtaaaattgagattctttgcatgaagagagaaggtgactagcacaaatacctcctttgacgccttgcgttcattggaactcagtgggaaaatcagcgcgtagtctagcctcctcatttacagatggaggaatggaaggctggcatagggcattgtgacaggcttcctgccacagcagaaaagtactggatttatataagggcagtgacctggcttctgatctaggccttgtcctaattagctgggaccttgaacaaattgcttgacctctctgggcttcaccttcctagtctgaagcctggagtgctgtccaggtctgattgtagattcttgttgtcctgggtcacttaccaagttagagttggagcttaggactaagctcctgttgctactctttgattcctctctcacctgccaatccccaactgcctgtcatcaagtcccgtaacccagagtctgtgtagggggctctttccctgggagatgcagtaaaatgaactggattacctttgttgtatactttttcagatataaaataaacactgcctgtttttcaaccattcacatggagattactttataatttagggggatggggttatccagattatattagctacataactaaaaccatatacctcttttaaaaacgatatggaatttttcaagctgagtcattgttgacctaggctctcaaacagcaatggtctgaacagcacttgtattgctggcattaagaaatgcaaacaaataattcgtgttcatcttcccaaaacttttgatccagtgctttatcaggcttcatctataaagaattcttgaagataacttttggcatctgtcaatctaattttcatttatttgcttctctgatactgagaaatgccattaagttgatatattagcagagaaccagatactttcagccatgaagtatcattacaggaaagtaatatttattttagttgaaaatagccagacttgcctatctctctcatcttcctttattgaaacgaacattttctttttatgtactttgcagcagttgtgactgttgtattatagatctgcaggtatttcctgcctcttttgctctcctgatatctctgcattcttacttggatgatgccctcgtcctggccactgtagtaaactggtaattgcatttggacaattgagaggcggcttcctatgatgtaaagaacattgaagaaacctgggtcctagccctagccctgtcatttactagctttgtgactagccaaatcattttcatttctctggactacagttccttcatttgaaaaatgaagggattatactagttggttcccattctgccttattttgtggctaataatacttgattgtcatctctctctctagatagacagtaaactcctgaggatgaggagcctcttatattatctttgatttcctatcacacctagcaaaaataccttgtacttggtaggcccccattgtgtccatgttgacagaagataaacaggtgctaaagttttttgttgttgttgttgttgttttttttttggagatgtttgtaccaactgtaatggccatttgcaggctttaaatgcttagagggcatgctctcctggtcagcctttttttaaattttttctttttttgagacagagtctcgctctatcgcccaggctggagtgcagtggcgagatctcagctcactacaaagtccgcctcctggattccagcgattcttgtgcctcagcctcccaagtagctgggattacaggcgcacgcccaccatgcccatctagtttttatatttttagtagagacggggttttgccatgttggccagcctggtctcgaactcctgacctcaggtgatccacctgcctcagcctcccaaagtgctgggattacaggtgtgagctaccgcgcctggctctggcccagtatactttaatctgcatacttgctgcattgtaaatttcttgatcatgatgacacagttaataagtagtaagtcagtgtgaagaatccagatctgtctgatttcaaaatttgtttattttattaggctacactgcctctctgggtataagaataagcatagttcatcaccttaaggaatttatggtcaattgtaaacaattaactatatagggtgaagggaagtaaatgttgaatagactattctgattaatgtctggctccttgggatgtgatcctgtattaatagtcttgaagactttcatattcagagatttgagcacacagtaggttccatatcacagtattttgaaaagaatgtacaccacaagtaccagcttgcctttttagccagcatatttggaaaagttgagcattttatgtctgacctgaattcaaacacaggtgtaacaaaactgtgtaagtaaactagtctaacaggaagaaggtagagatgtttggtcatgtaatgactccttaaatctacatttttttcagcaagtagaaaagtatttgggtagctacaaatggagagatttttctttaggcaactaaaaatatatacatagaatatatacaactacaatttgccaatttacaattaaaaaataaaaattaaaagaaacatacagatagaaatacatctttcctcttgagttatttaggtggagctcaccgtgatttttttttttttttttttttttttttttggtgacgtagtcttgctctgtcactcaggctggagcacagtggtaccatctcagctcactacaaccttcaccttccaggttcaagcgattctcctgcttcagcctccgaagtagctgggattacaggcacttgccaccacgcctggctagtttttttgtatttttagcagagtcgggtttcaccatgttggccaggctggtcttgaactcctgacctcatgtgatccacctgccttggcctcccagagtgctgggattacaggcctgagactccacatctggacatgatactttatttagtaactttttgcattttaaaaaaatgttagtctaaaagtatgctggttagttacagctaatagcctcctgaggtgtatatatatagttggccaggcgtggtggctcacgcctgtaatcccagcactttggaaggccaaggtgggcagatcacctaaacgcctaacccccagaggtaaaggctgcagtgagccatgatcgcatcactgcagtcctgcctgggtgatggagtgagaccttgtctcaagaaaaaaaattgtgtgtgtgtgtgtgtgtgtgtgtgtgtgtgtatttgcattgtgtgtgtgtatgtatatagttgcattgtgcttttcccccattttcatttaaaagaaaggtcaaaactgtggctttatctcttgcagcctgcactacttaggaatgagacaaaggaaaatgattaccattaattgccatgggcaattaaaaagagttctttgttcagtaacaaattgattgtgtacaaatgaaagtcagcactgcattaatacaagattattagattcttgaaatcagcatcttctgctagagtagctttcacttcaagggaattatttcactgggaatagcgtacctaaatgattggtgataaaatgtatcactaggtctttatttttcagaaatgcctgttaacgttgtaggtagaggctggtggatgctgcttttatggtaacctttttaatgtcctgaaatcactgtgtactttttttttttttttttttttgaaacagagtcttgctttgtcgcccaggctggagtgcagtggcgccatctcgactcactgcaagctccgccttctgggttcacgccattctcctgcctcagccacccaagtagctgggactacaggcgcccgccaccatgcctggctaatattttgtattttatttagtagagacggggtttcactgtgttagccaggctggtctcgaactcctgactttgtgatccgcccacctctgcctcccaaagtgctgggattacaggcgtgagctaccacgcccggcttgtatactttttttaatgctgtcaatgtataagaaatttcttcttctgggctgggcacggtggctcatgcctgtaatccccagcactttgggaggccgaggcgggtggatcacgaggtcaggagatcgagaccaccgtggctaatacggtgaaatcccatctctactaaaaatacaaaaaattagccgggtgtggtggcgggcgcctgtagtcccagctactcaggaggctgaggtaggagaatggcgtgaacccaggaggcggagcttgcagtgagccgaggtcgtgccactgcactccagcctgggtgacagagcaagactcagtctcaaagaaaaaaaaaaaatttcttcctctgattggtcagtcaactgaggaacgtagataaaacctttgataaatgaggaagaagagaaaaagactcctgactgctgtggagtaggtcttggctgttggcatgtacctagtagtagccacgcaacaaccataaaggcttaaaaaatggcagccttagctaaagtagttgtgatttgatgttatgtatatacaaggtgtatatattttcttgtgtgcaaatccccttttaagttttttcttaaaaaaaaataaggtataatctacatgtagaaaagtacgtaaatcttaagtgtccatttctgaattttttgcatgttgtacaagcccctttttcatatgatggggcataattcccttttctacatagttcttactgagccggaaattatttgagagtctctatataaggcacttcaattattactttatatttaatatacaaatgtgaacatgtaggatgtttctaactttacccatctgggcagggtcaaatacctgataaagaatgggataacggtgatttcattgtataaactgtcacaagtgtgaaagcattcttttaacaacatcttttctactcgtgttgttaattccagattattttgatctttgtttgctggaaattaaaagaaaagagatagtggtcactgctaatgagagtgaaatgggactggtattgaaattgctatcaggcctgcaaacaagtgtgaactttcaggaaagtagtttagcaatgttttatttgtttgttttttgagatggagtcttgctctgtcacccaggctagagtgcagtggcatggtcttggctcactgcgacctccacctcccaggttaaagcagttctcctgcctcagcctccccagtagctgagattacaggtgcgtgccaccacgcctggctaatttttgtacttttagtagagatggggtttcgccatgttggccaggctggtcttgaactcctgacctcatgtgatccacctgcctcagcctcccaaagtgctgggattacaggcgtgagccaccatgcccgtccagcaatgttttaagaaacgtacaatccttgatctacttataagaatctatagagggctgggtgcagtggctcatgcctgtaatcccagcacctggggaggcctaggcaggcggatcacttgaggtcgggagttcgagaccagcttggccaacatggtgaaaccctgtctctactaaaaacacaaaaaattagccaggcatggtggcgggtgcctgtaatcccagctactcgggaggctgaggcaggagaatcgcatgaacccagaagacagaggttgcagtgagcggagattatgccactgcactccagcatgggtgacagagtgagactctttgtctcacacacacaaaacaaagaatatatagggaccaagaaagagagatgtgaatcaagattgtatacaaaagagatgttaactatgttaactatatgaatgtttataaatttaaaaaaaaatctaaatgttttaaccttaggggaatggtttgctttgtggaaaggttatggagtcattaaaaaagtatgtttttgagaatacttgacgtgggaaagtgcacacaaaataaaattaaatgtgggaaaaaataggatatagaactataaacagcatgagtccagttattttaaaatatatatgtgaaaaagtggaagaaatatgctgaagtgttattagttaactctgtgttgtaggattatgggtgattaaaactttttttttaattttcccaagctttccacaatgattttactatttctgattcagggaaaaaaagattaaacaagttttttttttttttgtagtgtggttgtgttgtgtttggtttttcttataaacatatgaaagaaaaattgagctgaaaagcaagaaattcatggtaagatctgttggactctagtacctttgaaggtaaggcattcaccctttcttagagaataatcaaattaattactaataaggctgggtgaggtggctcaagcctgtaatcccagcactttgggaggccgaggcgggcggatcacaaggtcaggagatcgagaccgtcctggctaacacggtgaaactccgtctctactaaaaatacaaaaaaattagccgggcatggtggcaggcgcctgtagtcccagctactcaggaggctgaggcaggagaatggcgtgaacccgggagacggagcttgcagtgagccgagattgtgccactacactccggcctgggcgacagagcaagactccgtctcaaaaaaaaaaaaaaattaattactaataatattaccaaataataacaatgaactgtttattacataccagaagactaaaaaatgttatctcattttctcctcacaataaccctctggggtaggtggtattcttaccttctaggtgggaaaccgaggttgcagagaggggacttgcccaaggccacatggctagtaggtccccaaagcagtctggcccagagtctctgctctctgttgacttctctggccgactttacagtttccagagtgcttttttaacacactttccagaaagtctggaaaggactttacactttccagaatgctttcgcccagtgtgatctcagcccagagatgaagagaattcaagtctactccatggtggatagatagagctgaacccttagttctctttgaacaaggttcccttctaacccctaaagtgtgcttgttttaagagaaaggagccggctgggcatggtggctcacacttgtaatcctagcactttggtgggccgaggtgggcggataatttgaggtcaggagttcgaaactaccctagccaacattggtgaaaccccatctctactaaaaatacaaaaaaaaaattagcccaggcttggtggcgggcacctgtaatcctgctacttgggaggctgcggcaggagaattgctagaacccaggaggtggaggttgcagtgagctgagatcgcgccactgcaccccacctggctgacagagcgagactctttctcaaaaaaaaaaaaaagccgtcggtcaaagtcaggaatggctataaaattagtgatgtgttcccttttatgggccaaaaacatcattttaatgagatttaaatttatttaagctttttttttttcttttttgagacggagttttgcccttgttgcccaggctggcgtgcagtggcacgatctcggctcactgcaacttccgcctccggggtacacgccattctctggcctcagcctcccaagtagctgggattacaggcatgcgccaccaccctgggctaattttgtatttttagtagagacggggtttccccatgttagtgaggctggtctcaaactcctgacctcaggtgatctgcccgcttcagcctcccaaatgctgggattacaggcgtgagccacctcgcctggctaagctattaattaaattttttttcccaaagtcctgttttgaagtcctgtctataattaattttatttaaataatttagcaaaagtttgttaagcagaagagggaacaaactagttctttgtagttccagaggatagaggtagaggtctaggtatctacaaggtttagagtgcacaaaacatgcctcttcctctctgggagaatttttatgccgtttataaaacaaaagcaattcttcccttacaggtaacacaaggaacacactgtttctttaccagaatgtaaaaaatttagaaggccagtggcctgattgtttttacttgatcttatcttaaagaattatgtgtgactaagcatttcaatgcaagaatgcattgactaggaagacagatttcgtcttattatgagaaagaacttttaaagaaaacgatccaagctcatgttttatgttttgtcttttttttttttttttttttgagtcggagtcttgctctgttgcccaggctggagtacaatggcacaatcttcggctcacagcaacctccgcctcctgcgttcaagcgattctcctgcctcagcctcctgagtagctgggattacaggcgcctgctaccatgcctggctaatttttgtatttttgatagagacggagtttcaccttattggtcaggctggtctcgaactcctgacctcgtggtccagccgcgttggcctcccaaagcgctaggatacaggtgtgagccactgcgcccggcagttttgtcctttttttttttttttttttgagacggagtcttgctcttttgcccaggctggagtgcaatggctcagtctcagctcactgcaacctccgcttcccgggttcaagcggttctcctgcctcagcctcctgagtagctgggattacaggcgcccaccaccacacccggctaatgtttgtatttttagtagagacggggtttcaccatgttggtcaggctggtctcgaactcctgaccttgtgatctgcccgcctcggccttccaagaagtgcagggattacaggtgtgagccaccgcacctggccccattttgtgttggataagcaataattttaaagtttaccccatttggttttattgttgtttttatttaacaagacgtctacacatatatctattaaatatttatttactgatcattctttctgttgtcggggagagtaacagatcttcagttcaaggaggttggcgttcagacatcaggaagaaattgcaaaataaagtgttttggatcctctgtgagatttttgtcttttgttcctccatttgttctgtgacatcacctagaacatgacctgacaggtcagtaggagctcagtcttcattgaataaaagtatgagtttctgaatgagagaatcctggaatagatgaagtctgtcgcctttcagtcttcagattcttgggattcctcaagccatgtagaggaaagaaactttcctattgttagttttcatttgcatcttaccaactttgtgacttaggacaagtcatttattcttaatctgagttctcgtgtctataaaatgggcttaaatacctattttgcttgccacagtctttttatttttattttttgagaactaaataccataacgctaaagttggtaacctttgagtttgctggaagaatgaaagagaacaattaggtaattaaaatgttcaggtaagcgagcatgtgagggtgctgcaaaggcggcgtgatgaaattttggatcagtggagtggcacatgctattgatttgttatctcttggtctttgtacaacttgtaatttgcccccaggtagcagatagtttgaaggtcttatcagaaagtgtctcatacacctaaatgttaacaccaggtcataggccaaatagcagttgtccacatttgtggaggcctccgttactctttttctcatcatgacacatggcctaggtttgagtcccagtcccacctcttacctgctctgcaccctccgacaaggccctttaaactcttggtgccttaggcacgtcgtcttaaaaaggagaatatagtagtgtttactcatagggtaactgtgctagttaatatgcttactgtgtgtcattattagtgctgcactacctggacctggctttattttttttttttaatttaattttttttttgagacaggatctcacccacgttccatggagtacagtggcatgatcacaccttactgcagccttacctcacaggctcaatcatcttgcttcagcctctgagtagctgggaccacaggtgtatgcatgccaccaagcccagctaattttttttaaattttttttttcttttaagatggagtctcactctgttgcccaggctggagtatagtggtacaatctcggctcactgcagcctctgtctcccagttcaagcgattctcctgcctcagcctcccaagtagctgggactacaggcacccaccaccacgcccggctaatttttgtatttttagtagagacggggtttcaccatattggccaggctggtctcgaactcctgacctcatgattcacctgcctcggcctcccaaagtgctgggattacaggcgtgagccaccatgcccagcctaaatgtttttatttttcatagagacggggactcgctgtgttgcccaggctggtcttgaactctagactcaagcctcccttttcagcctcccaaagtgctgggattacaggtgtgagcacgtggctggacttggctttaagagaccagctaaagaatatagtggtaggaaaataaatacaggcataactcagagatagtgtgggattagttccagactactgcaataaagcatatatggcaataaagccagtcacacgaagtttttcgtttcccagtgcatataaaagttaagttttggccgggcgcagtggctcatgcctgtaatcccagcactttgggaggccgaggcgggtggatcacctcaggtcaggagttcgagaccagcctaaccaacatggagaaaccccatctctactaaaaatacaaaattagtcaggcgtggtggcgcatgcctgtaatcccagctactcaggaggctgaggcaggagaatcgcttgatgaaaccaagaggcggatgttgcagtgagctgagatcacgccattgcgctccagcctgggtagcgagtaaaactgtctcaaaaaaaaaaaaaaaaaaaaaagttatgttttggctgggcgcagtgggtcatgcctgtaatcccagcactttgggaggcggaggtgggtggatcacctaaggtcaggagttcgagaccagcctggccaaagtggtgaaaccctgtctctactaaaaatacaaaaactagccgggcgtggtggtgggcacctgtaatccccagctactcagaaggctgagtcaggagaatcacttgaacctgggaggtggaggttgcagtgagccatgatcacaccattgcactccagcctgagcaaaaagagcaagactcttgtctcaaaaaataacaataaataaaaattaaaaaataaaagttatctttatgccgtactgtagtctaagtgtgcagtatcattatgtctttaaaaaagtatataccttaatttaaaagtacctttttaaaaatttaaatattttattaattttttttttggaggggggacagtttcgctcttgttggccaggctggagttcagtagtgccatctcagctcactgcaacctctgcctcccgggtccaggcaatcctcctgcctcagcctcccaagtagctgggattacaggcgcctgccaccgcgcctggctaattttttgaatttttagtagagacggggtttcatcatgttggccaagctggtctcgaactcctgacctcaggtgatccacctgcctcggcctcccaaagtactggaattacaggcattagccaccgctcccggcctaaattttttcattttttaagtttatttttttgagacagagtcttcctttgttgcccaggctagagagtatagtggtgcaatcttggctcactgcaccttccacctcccagatttaagcgagtctctctcagcatcctgagcagctggaactacagatgcgcaccaccacacctggctaaatgttttgtatttttagtaaaaacgggatttctccacattgaccaggctggtctcaaactcctgacctcaagtgatccacccacctcggctttctaaagtgctgggattacaggtatgagccatcgcgcttggcctaatttttatttttttgagagagactctcactctgtcacccaggctggggtgcggtggtgcagtctcagctcactgcaacgtctctcgggttcaagcaattcttgtgcctcaacctctggagtagctgggtctagagatgcgcacactaccacgcttggctaatttttgtatttttcatagagatggggtttcgccatgttggccagggtggtctcaaactcttagcctcaagtgatttgcccacctcggcctccggaagtgctgggtttataggccggagccactgtgtccagctcccacaacttcctttgtttttgttgttgttgttgttgttttttgagatgtctcattctgttgaccagcctggagtgcagtggtgtggtcacagctcactgcaacctcaacctcctgggctcaagtgattctctggactcagcctcctgtaaaaatactttattacttaaaaaatgctggtgatcatctgagcctttggtgaatcataacctttttgctagtggagggtcctgccttgatgctgatggcttctgactcatggtggtggttactgaaggttgggctggctgcagcagtttgttaaaataaggcagcagtgaagtttgctacattcattgattcttcctttcgtgaaagatttctgtatagcatgcaatgctgtttgatagcattttatccaccgtagaacttctttcaaaattagagtcaatcctctgaaaccctgctgctactttatcagctaagctatgtaatactctgaatcctttgttgtcatttctgcagtgttcacagcatcctcaccaggagtagattccatcttaaaaaattgctgggcgggccaggcacggtggcttaacgccagtaatcccagctcttcggaaggccgaggtgacctcatctgaggtcaggagttggagaccagcctggccaacatggagaaaccgtgtctctactaaaaatacaaaaatggccaggtgcagtggctcacacctataatcccagcacttagggaggccaaggcaggcagatcacgagttcaggagatagagaccatcccggctaacatggtgaaaccccgtctctactaaaaatacaaaaattagctgagcgtggtgacacatgcctgtaatcccaggtactcaggaggctgaggtagaagaatcgattgaacccgggaggaagaggttgcagtgagccaagatcgcgccactgcactccagccaggacaacagagtgagactccatctcaaaataaataaataaataaataaataaataaaaataaaaatacaaaaattagccacgcatggtggtgagcaactgtagtcccagctactcaggagggtgaggcaggagaatcgcttgaacccgggaggctgaggttacagtgagctgagattgcagcattgcactccagcctgggtggcagaactagactcttgtctcaaaaaaaaaaaaaaaaaatcgctgggtgcagtggccaacccctgtgaccccagcactttgagaggccaaggtggacggatcacttgaggccagaagttagggaccagcctggccaacatggtaaaaccccatatctactaagaatacacaaattagccaggcatggtggtatatgcctgtaatcccagaaacttgggaggttgaggcatgagaattgcttgaaacctggaggcggaggttgcagtgagctgagactgtgccactgcactccagcctgggtgatgaggcaagacaatgtctcaaaaaataaataaataaataaataaataaataaatcactttctttgctcaccaataagcaattcctggctgggcgtgtggctcacgcctgtaatcccaacacttcgggaggctgaggcgggtgagtcacctgaggtcaggagttcgacaccagcctggccaacatggagaaaccccctctctactaaaaatacaaaatttgccgagcatggtggtgcatgcctgtaatcccagctactcgggaggctgaggcaggagaatcgcttgaacccaggaggcggaagttgcagtgagctgagatggaaccattgtactccagcctgggcaacgagtgaaactccgtctcaaaaaaaaagaagcaattcctcatctgttcaggttttattatgagattgcaacaattctgtcacatcttcaaactccatttctaattgtagttcactttccaccacatctgtggtgactttattcaatgaagtcttgaacttctcaaagcagtctgtgagggttagaatcaacttcttccaaattcctgttaatgttgatattgtgagctctctcatgaatcatgaatcttctttttattttattttatttttattttttttaagagatgaggtcttgctctgtcacccaggctggaatgcagtagtgtgatcatagctactgcaactttgaactcctgggctcaagggatcctcctgcctcagcctaccgagtacctgagactacaggcacatgctgccatgctggactaatttttgtttttttttaagagatggagtcttactacattgcctgggttggtgttgaactcctggcctgaagggatcctcctgcctcagcctctcaaatgaatgttctttttttttttttttttttgagatggagtctctgtcactcaggctggagtgcaatggcgcgatctcagctcaccacaatctccgcctcctgggttcaagcaattctccggcctcagcctcccgagtagctgggattacaggcgcatgccaccacacccagctaatttttgtttttcgagtagagatggggtttcaccatgttggccaggctggtcttgaactcctgatgtaatccacccacctcggcctcccaaagtgcagggattataggcgtgagccactgcgtccagctcaagtgaatgttcttaatgggatcatgggatctagaatggtgaatccttttcagaaggtggactttgcccagatccatcaaaggaatcactatttatggcagtgttgccttatgaaatgtgtttcttaggtaataacacttgaaagtctgaattactcctggatacatggactgcagaatggatgttgtgttagcaggcatgaaaacaacattaatcttgtacatctccatcagagcttttggatgactaggtgccttgtcaatgagcagtaatattttgagaagaatctttttttgcaagcagtaggtctcaatggtgggcttaaaaatattcagtaaactatgctgtaaacagatgtgctgtcatccaagctttgttccatttatagagcacaggtagaatacagttagcatgattcctaaggcctgtaggattttcagaatagtaaataagcattggcttcaatttaaaaagttactagctgcatttgtctctaacaagggtcagcctgtcctgtggagctttgaagccagccattgacttctctctagctatagaagtcctagatggcatctttttccaacataaggctgttttgtctatagtagccaccttcatcaaggtgggctaggtcttctagatgacttgctgcagcttctccgtcagcacttgctgcttgcttcatcttgcacatttatgttatggaggtggctactttccttaaaccttgttaaccagtctctgccagcttctaacttttctctgtagcttcctcgcctctctcagccctgttgaattgaagagagttagggtcttgctctggattaggttttggtttaagggaatattgtggctggtttgatcttctgtctagaccactcaaacttctttctttccctttttttttttttgagacaaggtttcgctctgtcacccagcatggaatgcagtggcatgattatggcttactgtagcctcagcctcccaacctcaagcagtccccccacctcaacccccccaggttgctgggattgcaggcatatgccaccatccctggctaatttttattttattttttgtagagacaggatcagcgtatgttgaccatgctggtctcgaattcctggcctcaagcagttgtcccgccttggcctcccaaagcactaggtttacaggcatgagccactacaccctgccaaaactttctctatatcagcaataggctgtttcactttattttatttatttatttttacattttactttaagttctgggatacatgtgcagaacgtgcagatttgttatataggtatacatgtgccattgatggtttgctgcacctatcgacctgtcatctaggttttaagccccacatgcattaggtatttgtcctaatgctctccctttccttgctccccacctcctgacaggcccctttgtgtgatgttcccctccctgtgtccatatgttctcattgttcaactcccacttttgagtgagaacatgcagtgtttggttttctgttcctgtgttagtttgctgagaatgatggcttccagcttcatccatgtccctgcaaaggacatgaactcactcttttttatggctgcaggctgtttcactttatcactcgtgttcactggagtagcacttttaatttctttcaagaacttttccttcgctttaacaatgtggctgtttggcacaagaggcccagctttcagcccctcttggcttttgacatgctttcttcactaggcttaatcatttttagcttttgattgaaagcgagggacatgtgactcctcctttcacttgagcacttagaggccattgtgggattattaattggcctaatttcttttttttttgaaacagagtctcgctctgttgcccaggttggagtgtagtggcacgatctcggctcactgcaacctccgcctccgaggttcaagcgatcctcctgccttagccccactagtagctgggattacaggcacgtgccaccatgcctggctaatttttttttttttttgttagtagagacagggtttcgccatgttggccaggctcgtctcgaactcttgacctcaggtgatccgcccgccttcagcctctcaaagtgctgggattacaggcgtgagccactgtgcccggccaattggcctaatttcaacatggttgtgtctcagagaacagggacagagatgaggagcagttagaacacatacaacattttttcaactcgccgtcttatattggtgcagtttatggtgccccaaatcaattgcaatattaacagcaaacatcactactcacagatgaccataatagaataataatggaaaagtttgaaatattgcaagaattaccaaaatgtgacatcaagacatgaagtgagcatatgctgttggaaaaatgatgctgatagacttgctcaagacagggttgccaatgaccttcagttaaaaaaacacatgcacacatagtatctgaagcgcagtaaaaggaatggcaataaaacgtatgctggtcaggtgcggtggctcactcctgtaatcctaacactttgagaggccagggtgggcagattgcctgagctcaggagtttgagaccagcctgggcaatgtggtgaaaccccatctctactaaaatacaaaaaattagccaggcatggtggcgcatacctgtaatcctacctactcgggaggctgaggcgggagaatctcttgaatctgggaggcgcaggttgcagtgagccgagattgcgccagtgcactccaacctgggtgacagagcaagactccatctcaaaaaaacatagtatgcctatacgagtttactagtttttagctttgtcaaggagagaatttaaaaaagaaaaattattcccaccattatttcataaaaagtaggatctaggctggccatggtggctcacatctgtaatcccaacacttttggaagcgaaggcaggaggattacttgagcccaggagttggaggctacagtaagcaatgattgtgccaactacactccagcctgggcaacaaaaacaacaacaacaaaaaggatctaacttcagaataaaggatatcccttcccaaggaaactagctgccttatagggacatatgtaggtatatacttataattctcattttaaacataaactgaggaaaactgccacaggccagctgtttaactttttggggccttagttttctcatctataaaataatgatgatatcctttttttttttttttttttttttccccttttgagatagggtctcttgtccagactggagcgcagtggcatgctcacagctcactgcagcctcgacttcctgggctcagatgatccatctcagtgtccctaatagctaggactacaggcatgtgccaccatgttgtattttttttgtagagatggagttttgccatgttgccccagctggtcttgaactcctgggctcaagcaattcccccgcgtaggcctcccaaagtactaagattacaggtttaagggctagagtgcagtggcatgatcatggcttgctacagcctcgactttctgggctcaaatgatcctcctgcctcagctgagactacaggtgcgcacccaccatgcctggctactttttaaaatttttagtagacatgagatcttgctatgttgcccaggctggtctcaaacccctggcctcaagtgatcttcctgccttgacctcccaacgtgttgggattataggcttgagccactgtgcctggcccaggggtctatatctaaatcctaaagcttgcggaagttctttcagctgtccccatggctttgggcattatgaataataatccataggacataattggaaggtgtttcagcttaggatggattggacttttgaaaagcgccccttcttatagtcaacacaacatctcattcccctgtgaactcacccttagggaaatcattttacttttggacaagtgagaccagatcctcagagatagtttgtgactcttgcaataataatagcaaatatttccttaatcttttctatatgccaggcactgtattatgtactttacatgtattaactcaaggaatccacataacaacccaatgaagtaggtactatccttgtacccattactcagaataggaaacaggccatgcatgctaggtgatgtaagctaaggattcagaggaaggagaataataaattacccccacttagaaagtactggtctgggtttgtgtgctctctcttctgcccacctccctcctctctctctggccctacttgtttttattaatgtggggttaatgccggtgatttcatatactaaccttgatcattgggaaatgtttctctcacgggaaggtatttggatgggcatagtacattctttggtttgtcttcttgatctctagtttagcttacttgttaaagatttccagaatgatctagcagttaattccagttccattttcccctccacctttttatttttagtgaggtcctaattggatttttttaatcttaatttttttaatttttacctttttagagatgagttctcactatgttgcccaggctggactcgaattcccaggctcaagcaatcctcccgcctcaggctcctgagtagctggggctacaagtgtgtgccactgcacccagctataaatagatttttataatgtgatttttaaattttagggtattaagcttatcttaaagtacaatcaaagcctgtcacccatttcatttctctaatgcctccttgaagtattttgcttttgacttcggggaagagccttggagattgggtactgcatgatgctgcagggaggccagtggtttatgttgtcgtcgtccgtcctggagtgcttgccttaatgctgctcatttcaaatgcctcctctctgtttccaaggttgaattagcatcaggtcttcttttacatcagccttgtctaatataactttctgtgttattcattatggtaaccaccagtcacgtgttgctacttgaaatgtagctagtggggctgagaaactaaatttaaaatttttattattattagtttaactttaaatggccaaagtagtgcagatctagactatgctccgtaagggaggttttttttttcttttctttttttcctacttctaattctgacatagggctgtgctctttatgtatttgttaaatgctttcactagctgaaatacaaggaaagttaaagtattccttaaagtcttcctcccagggaaaaccgttgttaatagttgtattttttaactgtaggataaattgccagtttttattatcattacagtgattcacccttgattctagggatcgggcgttactcaaggttgttgtagatttgggagttttaggagatggaggaggcttagaatgcaggttataaatgtaacagaaagaagtatgactaatactggtaaaagtgtctttataatgattgttgcgatatgattgaatttctatcctaatgcttaagaatccttagtgaaaatgtgggaaagaggatgaatcactgttttctcccttcccaaatcccagatgattttgctagaattttaaggatggattgagtgttcaggtgattttgtcttgacttcttgggttggttgggatctttaaagagagagagattaaaaaggatttactactagcaaaactgaaaaagcagaaacatgtctgcttgaattttgagtttcttttctctttgatagtggaagcagcatcttaggccaggttcattttgtaactggtgtgggtgtatgtatgcatgtgtacatccgtctcatgtttgttaaattttcttgactccctaacagttgtttgtactccacatcatcagttttggtaccttctactcgttactgaaaggatatatttaccttctcagtgggttggtgaagatggggggtgggggagcatatatggaaactgatgaaaatgataaaaccgtggtgctccaaagtaaagaaaggaatttttaaaagcctttgaattaactggaatgtgggatcttggattggatcctggtacagaaaaggcaataaatagaaaaactggtaaaatctgaaagtctgtagtttagttttttgtgctaatttcttagttttgacaaatacaccatggttatgtgaacattaggggaagctgggtgaagggtatgtgaggactctgtaacatctgcagcttttttgtatatctaaaattattccagagtaagaaattgaaatagaagctgtgactagcaagagcttccaagggctgtgacttcaccaagggagtgtgttcataagtagggcttctctctaagggcctctagaagttctgcttatctgcccacttccctccttcaactcagtgctctaaccatgtggaatgactaactctccccaaaatccatgcttctgggccgtttcatacacttctcatcggggtattctcctgctacaccctccccgaccgaaccaaaaacaaaatacataaagatcacctaaaaaacaaaaaatgcagcttgactaattccttttcattctttaggtctctggcttagattttatttttttcaggaagccttccctgacccacagaagtcagtgtcttgtctgagtttgcctgctgagtggaaccctcattgtgctggtacttagtactttgccttttttttttttttctgagacggagtcttgctctgttgcccaggctggagtgcagtggcacgatctcggcttactgcaagctccgcctcctgggttcatgccattctcctgcctcagcctcctgagtagctgggactacaggcgcccgccaccacgcctggctaatttttttgtatttttagtagagacggggtttcaccatgttagccaggatggtctcgatctcctgaccttgtgatccgcccacctcggcctcccaaagtgctggggttacaggcgtaagccaccgcacccggcctcaatcaataatatatatatatatatatatatatatatatatatatatatatatatatatatatataaaatattgattttatacacacacacacacacacacacacacacacaccccacaacaagaagtaaggctcctgctcacaccttcttaggctccactggcagcagcttccctcatgcccttgggtaacggtggctgtggtttgctctgtaccagcatatatgctgtagatggccaaatccctgccagggagacaaactcagcaccataaaggtgagaaagcacattttgtaaggcttattcttatatttcaaggtcccaggggtccaatttaggaaaatgttttgttttttaaaatctgcttagttatgtagcattatcttttcctgtactatgtgaatttacagctcattttaccataaaagataatgtgtaggttgtttaaaacctgttctttggccgggtgtggtggcttatgcctgtaatcccagcactttgggaggctgaggcgggcagatcactaggccaggagatcgagaccatcctggctaacacggtgaaactctgtctctactaaaaatacaaaaaaaaaaaaaaaaaaaaaattaggcaggggtggtggcacgtgcctgtagtaccagctactcaggaggctgaggcaggagaatcactggggtggaggttgcagtgagccaagatcacgccactgcactccagcctgggtggcagagcgagactccgtctcaaaacaaaacaaagcaaaacaaaaaaccctgttcttggactgggcatggtggctcacacctgtaacccctgcactttgggaggccgaggcaggtggatcacccaaggtcaggagttcgagaccagcctggccaacatgatgaaacccctgtctctactaaaaatacaaaaaattagccaggcatggccaggcgctgtggctcacacctgtaatcccagcactttgggaggctgaggtgggcagttcacgaggtcagtagatcaagaccatcctggccgacatggtgaaaccctgtctctactaaaaatacaaaagttggtgtggtggcgtgtgcctgtagtcccagctactcaggaggctgaggcaggagaatcccttgaacctgggaggtggaggttgcagtgagctaagatcgcaccactgcactccagcctgggtgacgagtgaaactccatctcaaaaaaacaaaaacaaagacaaagaaccgttctttagtaaaccaatcaacagcgattaattatataaaatgtgcaccgccttaggtggtatacatagcactatcagacatggctcctgcttttgaatttcttactttctagtaggggaaaatagaatatcctcaccccacagtgtgttactgtggctcaaccacatgaatcaggaaacaagagtagaggccattcggagcttgcagtgagccgagatcccgccactgcactccagcctgggcgacagagcgagactccgtctcaaaaaaaaaaaaaaaaaaaaagagtagaggccattgtggtgggtggtgaaacattacaagtactaaagccattgcttcagctttctttaacagtgtgaccgctgaaaaactaaatggttagtgttttgggttgcctctagtgagacatggctagacgtgcagattctaagcaaaggttataggaacttgaggttctgtagacccttaaggggttgggtcaggggtgtctatgatgctttcagaatgagtatatgctgaattttggggtctgtatattttctgcagagagagaatttgtagatttcatcaaattctcaaaggaatccatgacccaaaaaagactacaaccactggcttagagtaacactgagccccatggcctcattttgtctccgttttactttactgttctagattgagacctgccttttatttttccctgatacttatttggaggggtccttgatgcaaagaactctattgttgaacatctaaggaggagtatgtaagctttcttttttggaagcttgggtattatggctcttaaatcttcatcttttctgtcattgtttagtaaaaatgtctttctatttgaaataatgattactgtatttctaggtgcaagtattcattcatttgtcatgtatttatatgctgaggcccatgctgggcagtggtcatagagagatgaaatgaccagatcctggcccttagaggcttttagtgatacacatgtaagtgctcagaaatggtagctgttagtctcctgggaacagctattatatagtgtcatggccaaagtcatagaggatatacagggtagaacaggaacacaggagaggttatctagactatgtttcattgaaatttcactgttgattcatctcattagctcattgatgggttgcaaacctttgcatgagagggtgtaacagattaggtgtttggggcctttgccaaactggagaggtacagttggaaacacgacagtgactgaggctgtagctgtgacacatgtattcaaatggaactcacttaaaaactattgactctatttctctacttttctgtcgacaacagtatacggttctgtttgcccttagtcactcaggaggtatttattggatgcccagagggtgtgtaatactggactggacccttggactggactgtttacttactagaagagcagatggaaatgattgggttgtggctctttggcaatattctttgctgtctcccagtagtcagtatggtaataagcttccctctggtgggaggtaggatagttgggctttggaaatcaaaataccagagttccaaacccagctctgccactttccatctgggtagccttggccaggtcagttgatacctctgagccttggttttctgatgtacaaaatggggatataactatcacccgccctccaggacttctgccacatagtagagcccaataaatggaagttgtattgttactagcaggtgaggattataaaccatggaggaattccctcactttattgattcattaaggataattattatgttgtgcagaagaaggagtattctacttatgtgaatgggggagtttggaattcctagttagaaacagtggctcaatctctcatttttggccacttttcttaggctttttgctagggcaagttttttttttttgttttttttttttagatggagtctcgctctgtaaccaggctggagtgcagtggtgcaatctcggctcactgcaacctccgcctcccgggttcaagcgattctccttcctcagcctcccaagtagctgggactacaggctagcaccaccatgcccagctaatttttgtattttcagtagagacggagtttcaccatgttggccaggatggtctcaatctcttgacatcgtgatctgcccgcctgagcctcccaaagtgctgggattacaggcatgagccactgtgcccggccagggcaaaggttcttaatccagggttcctgaattttttgtgtaagtccattctattttctgggagaaagtgttcaagtttttatcagattgtcaaagggattcttaactgccaaaagattaagaattggttaactggccaggcgcgatggctcacgccttaatcccaccactttgggaagccgaggcaggcagattgcttgagttcaggagttcgagaccagcctgggcaacgtgatgaaatcctgtctttaccgaaaatacaaaaattagccaggtgttggccgggcacagtgactcacaaccgtaatcccagcactttggaaggccgaggcaggcagatcactgaggtcaggagttcgagaccagcctggccaacgtagtgaaaccctgtctctactaaaaaaaaaaaaaaaaaaaaaaaagaaaaattagccaggcctggtggcatgcctgttgtaatccaagctacttgggagactgaggtaggagaatcacttgaacccgggaggcaaaggttgcagtgagccgagatcgcaccactgcacctagcctgggcgacagagcgagactttgtctcaaaaaaaaaaaaaagaaaaaaaaaaagccaggtgtgctggcacacacctgtagtcctagctacttgggaggttgaggtgggaggatcactggagggaagtctaggctgtagtgagccatgatcacgccactgtactccagcctgggtaacagtgaaaccctgtctcaaaaaaaaaaaaaaaaaaaaattggttaatggacctgttgggtgggtatggagccacagttggtacctttgatcctgaaattgtccattataataagatattactgagagcaattttctaaagtacgaagtatgtaatgaagatacagggagaatattcagaagtttttgttggctgctttttttttttttttttctgccaggagtaggtgggacaagtataaaggaaagtggtatcaggaggaagtaagaagtaagaaaccacctaaataattgttagctgcttgtcctcatagttctttccataggttgattctgagttggggcgtctctgcactgtaccttgcaatcaggccggaccacttgctttttcctgaacactgtgttcaggctttgtatgttcatgaggtccctctgcctagagtatctcttctcccaacatttgtaagtccagttctccatgcatcagagcttcctggtgttgccttttagagttctcatcagcttataactccctggagagcactgactctcatcttcggatccttcaccgtcatggtcctttgcacatggtaggtgctaaataaagggttgtggaactaagtgaagagtgatacatatgaaggaaacaaacacctgtgtaagggagaaggctataaattaaaattttcagataccagtgaattctgcgggggagcttgggaaacccttagagtttcactgacaacctgaatagggggaggagcctgccctgagttaggaagcaggagtgtggggaacaggtagccagccataaggtcttggccaggtcatatcacttctggactggagttaacaccttcaaaaactgttcgggttggactttttgaacatataatagaggtgatgttgatgagcatctaccgtataccaggtactactctaggtcctgggaatatagtaggttgccaccagacaagaccccttcttttctagtgggaagcattgggtgggaagttagtcctttctagccttaaaatgctgtgattctgtcatctgaagaatgggcaccaacttctgcttgggattgttttgaggatcaaatgagaaagcactttaaagattataaaacacacttaccttgtttattatgaatacttctctccccccttggttttgccccccttggttttgacttaggttttttaaaagtttaaaattgaattgtaccaataggagtatgaactaatgatcccagggtttaggtagatttggggacttaaatctttcaataagtgatcctttagctagattgggatgtaggtttgtaatatcatcttcaccagtgaaaaatgtattgggggggaagtccatttatttatggatattttggatattttgtttctgccttaacataagttcgttcgttcgttctttctctttttttttttttttttttaagatttcaaactgtctctgccattattcttaaatacaactttatattggtgaaggctgcttgtcagggaaaaaccaaacttctctactgatttgggatttttttttaccataaattcagggtgcagttgttcttgaagtggttccattttgtgattaggctgagtatttttaagcacaactctctcccttgtccttagaattatctccagtatcctcaaaacaaagagcaaatgatgcaattaggatgcaatcccttgcctgtggatttcaaggaaaattattttccacactacttggaagctcatggacaaagtcaagctttctttagatctggtgaacttagaaaaaataacttgatgaagtgagattcttaccttgaggttagtttttgagagtggatcaatgatgtgaaatttctaagatattcttgatttataaatatcactttatgactcattccttggagcagtttttattttttcctttgaaaaactttagatgtaattgactttggtttacactctatcctgttttttggtttttttttttttttttttggagacggagtcgctctgttgcccaggctggagtgcagtggcacgatctctgctcactgtaacctctgcctcctgggttcaagcgattctcctgcctcagcctctcgagtagctgggactacaggtatgtgccaccacacccagctaatttttgtatttttattggagatgggatttcaccatgttgaccaggctggtctagaactcctgacctcaggtgatctgcccgcctcagcctcccaaaatgctgggattacaggtgcaagccaccacgcccggccatacttttagtgaaaggaaagccatgtatctttttctgctgtctcctatgtcatgtcttactctgccgttttgtaatggtccttgagattgagataatagagagagattttctagattttcacctactcactgatttttactacaggcattttaattcctttaaatttgagactgattttcttcccatagtatttaacttatcatcatccttataggagggccagacccttaggatttatgtgaatactgctagttggtaggaaaggtacttttcctgaagccttgaaagagtatttccagaatagtgagcttcatatttttttggtaacttttttttaaaggtatactttctgtgtaaatagaaatgaatttttgcaattggatgagggggaaaaaagctgaaatttaagggcaaaatcttttttttttttttttgagacggagtctcgctctgtcacccaggctggagtccagtggcgcgatctcggctcactgcaagctccacctcccgggttcacgccattctcctgcttcagcctcccgagtagctgggactacaggcgctcaccaccacgcccggctaatttttttgtattgttagtagaggcggggtttcaccgtgttagccaggatagtcttcgatctcctgacctcgtgatccacccgcctcggcctcccaaagtgctgggattacaggcgtgagccaccgcgcccagccgggcaaaatcttatagcatcttatcccttctatggtttgggaaattaagaaaagtgcacgttggtgttttctcacaatttaatgctcaggcaagtaaaatgatatccttaattgcaagttactgaagttgaaaggcgaccatttcccatcaattagaaatggtctttatggttaactctggcagaaattctgttcttctgtgaggcttgggtgatatcagtaatcctattgaggagagagcatattgaatcctctgactttgggcaaataatttagtctccaggtcccaatgcccttgtctgtgaaatgaagagaatacttacccttcccgggtggatttaaaaatctgtgaggaaggccaggtgcggtggctcatgcctgtaatcccagcactttgggaggctgaggcaggcggatctcctgaggtcaagagtttgagaccagcctggccaacatggtgaaaccccatctctactaaaaatacgtaattggctgggcttagtggcacatgcctgtagtcccagctactcgggaggctgaggcaggagaatcgcttaaacccaggaagcagaggtttcagtgagccaagatcgcgccactgcactccatcctcggtgacaagaatgaaaccccgtctcaaaaaaaaagctataaggaagcccagcacagtggctcacacctgtaatcccaagcactttgggaggcctaggtgggaggatcacttgaactcaggagttcagaccagcctaggcaacatggtgaaaccctgtttctacaaaaaattagccaggcgtgatggtgtgcacctgtagtcccagctgaggtgtatcaccggagcccgggaggtcaaggctgcagtgagtggttattgcgccactgcacctgcactccaacctgggcaacagcaagtccctgtctcaaataaaagctaagaaggcaagttttgtaatagtactttgagcagcataaggtacatatacaaaatattgtgggaaatatattatgaagttttgcatctaggtacataagagactgtttccctcacagtggagagctttggtaaaagagcaagtggattagagcagttgtagcttctgttttctccagaaagctcacgctgtgcagcagctgtttttgtccattctggctttgcagcagtgcagtattggggttaagccacgtgtgtgggcctcagaggcaggcagctggggccatactaagccgggtgatcttgaacgagtctcttgacctctgcaagcctgttttctcatctgtaaaatggggattataatagtagctgctctgttgggttactgtgagaaatgcttaatatggattgtagggcatgatttcctatggtaaggtttttagaagtaataatggaccagctaaaaatgttcaagcatttatctactgggcatgttgtctttttttctttctttcttttgagacagcttcttgttctgtcactcagtctggagtgcattggcgcgatcttagctcactgcaacctccgcctcccaggctcaagggatcctcccacctcagcctcccaagtagctgggactacaagcgcatgccaccacacctggctaatttttttttttttttttttggtagagatagggttttgccatgttgccagactggtcttgaactcctaaactcaaacaatccacccgcctcagcctcccaaagtgctggggttacaggcgtgagccatcgcgcccagccttcagcatgttgtcaaaggaagtatgaaaatgacaacaactgatggcccattttcatcagtcatcctggaaatcagcaagagtcaagctgctttgtgcacttattggggtgcacttattttctccaaggtgtccatttcatgaggcattttttgttaatggaaagctgggttagcaaatgcagtgatgaagggccataagtatagttttagtagttgttaacccttgaaggtagtgggtttattttgtctttttttttttttttacgacctccaacactttctatttatcttggcttaatataatacctgaaaatgaattttagttaagacttagagatttgtctaaacaatctccaagcaggttgaaaactgagactttcaagagccaggggatttgagtgtattctggattaacttggttcttcatctttccaagaaaggtaaactgtgttctaggcagtttttgtaatgggattttcaggctagatctttaaccaaaaaaaaaaaaaaagaggccctacagaaacttagaaacagcctttacagggtcaaggggagctttgacaaggaagaggcaaaaatctctgccccatgtgtcagttgaacttcttccaccttccctcaccagtggctacatttcagggctgaaagggctttggaatcctttgctgagtgctttggatgagatttgttttcaagttgctttttagaattagagtgaccatttacatggttttcattcccaatctgtgaattccaaagccttataccagtcaccaggcagatacgttacctaagaagtgcctacttttggaggccgaggtaggtggatcacctgaggtcaggagttcggctaacatggtgaaaccctgtctctactaaaaatacaaaaattagccgggcatggtggcgcatgcctgtaatcccagctacttgggaggctgagccaggagaatcacttgaacctgggaggcagaggttgaagtgagccgagatcgcgccactgcactccagcctggctacaatgcgagactccgtctcaaaaaaaaaaaaaaacaaaaagaagtgccctctgtgtgtaaggttctgaggaaacataaaggaaggattctcccaattccacaaaaactcgatttagtcaaaaaaatatacttattgactttcctaaaaaattaaaaagaaaaacaactaaatacacagccaactagcatcttcatttttagaactcaaaaattaattggaatatacctagggagaaattttctggaatttcattttctgggatattttttaaaattgctagtcctcattcctttgtcattttatatttcattttccatcttagttaatattgctgtttttatttcctcattctctgttattgtatcagttattgtccaatcaggaaagtagaaaccactctagatagttccagcaggaagggacttaaatgcaagggatttattacaaaggtgctggaaaggcttgggaggagcaaaatgcagaagagggttgttatccagagatgagaaagctgcctgtgggctagaacccaggagcctccatgcacagatgagctgctgctgctgctgctgctgctgctgctgctgctgttggagctgtattgctgcagttcaccaggaacccagaagccaaaactgcgctgatgtgctggaacctgcggtgtgtgtagttgcctgcattcttccatagttgttcactgctcctgctgctgctgctccccaagacagagcagtaacaggaaaaaagtggtgttatccttccacttgccaaccaatctccagcctttgaaaacctaactgtggaagccagctggcaaaggagtctgggaaatgtagtgtgcaggctttcagttctgctgatacggaggagaatgtagaagggcgcgtttgaccaaatgaatgctgtaattgcttgggtgatgcatttctcataacggagatgggcagagaaggcattattttacactgataacattcagagaggtggagaagaggcacagtggcattccagataaggggatagccagagtggtggtgtggaggcaggaatgctcatggcatgttcagagaatagcttagctggaccatagagttctttttgaaggatagctagaaatgaaggtagaaaataaggttgggttcaaattggattgagattgtggtagtaaaagctgtcttacaattaacccatgttgggtgtggtagctcacgcctgtaatcccaacattttgggaggctgaggctggcaatcatttgagcccaggagttccagaccagcctggccaacatggtgaaaccttgtctctacaaaaaaaatacaaaaattagccgggcatggtagcacacccacacatctagtcccagctactcaggtaactgcagcgggaggatcgcttgagcctgggaggttgaggctgtggtgagccataatcgcgccactacactccagcctgggtgacagagtgagaccctgtacaaaaaaaaacaaaaacaaaaacaaaaacaaaaaaaaaaagaagaagattaacccatagcactttacacagtgatttgagctgggatagaccaatgaggaaactcttatgatagctcaagctttaagggcttgaggactgtggtaaaaacctgtacattcaagacaaagttgtcttgaatgaattgtttctgtcttaagaactgaggctatggtagtggagttggagataaacagttcattcaaaacaagcttttaactgatgtacctgtcaatggcttggggcaagtaattggaataaataatgaattctgattttctgttgatttttctatataaattgaatttgttgattaccttatgctcttgaaaaggtcttagttctctcttttttatgcttttacttctctgggataatgccttgataagttagactcatcatggtattgttaggatcttccttgaagtggcattaaattcactttgatcataaactttattcataaatttgttttttgttttttgggtttttttttttttttttgagatggagtctcactctgtcacccaagttggagtgcagtggtgcaatctcggctcactgcagcctcctcctcccaggtttaagtgattctctgcctcagcctcccaagtagctggaattacaggcatgtgccaccacacctgggtaatttttgtatttgtagtagagacggagttttgccctgttggccaggctggtctcgaactcgtggcctcaagtgatccgcccaccttggcctcccaaactgttgggattacaggcgtgagccaccatgcccagcctttattagccaatttgaaacctgtgcaacaagttctgcagggccttgataacttgaggtaatacttaaattacttgtggacaggtttttggttttttctttggacactaattcattaattccatttaggaggtatttattgagccagcagtgtgtgtggtgctgaggtcacatgaggagcagaatagataagacattaaatccccatctttttggagttaacaatttaatgagaaatagaaattaaagaaaaaaaaaacattcctcggccttagggcccttgcagttgctgttcagctgcctggaatgctgtcccccagatgcccagattcttaactcccttgcctccctcatggctgctcccacgcctcctgctcagtgggacctgctctggccatccctttcagctctgtgcatactcctctaccacgtgccggggctttctccccattctatttccctcctaagtttgctttgtaattgtctgtttccctctgctagaatttaagttccatgaggcaggcatctttgtctcttttgttcattgctgtatccacatgcctagtacagtgcctggcacagtagtaggtgcttgctcagtaattttcattgaatgattgaatgggcgaatgagaataaataaatgagggcatccagggaacccaaggaaggctacagtggctagtgagaaaaaggcagaatggtggagatgagatcacatagggaataagaatttgagggtttaatataagagcaggccaggcatagtggctcacccctgtaatcccagcacttcgggaggccgaggcaggtggatcacttgaggtcaggagttcgagaccagcctggccaacatggtgacaccccatctccactaaaaatacaaaaattagctaggcatggtgacgcgtgcctgtagttccagctacttggaaggctggagcaggagaatcacttgaacccgggaggcagaggttgcagtgagccgagatcgcgccactgcactccagcctgggtgacagagcttagactctgtctcacacaaaaaaaatgatcaaatctgttctttaaaagataacttgctgctctaggagagcaagagtatacatgtgaagaacgcgtaaggctgtggggatccaggcgatctagattccctggcagcagatacgttggctttctcagctgttgaatttgagtgcccattccaagggtaggcattgattgttatcattctgattatacttgcatgcacttaggttatcattagcccctagagacttacctgtctccttgaagaacatcattgtccagtgatcctgctgacagatgagagctgtcaagatagcttggctgtgagatgccatttaactagtttttatctgtgtatgctttccctccccctgcaagatttaatgacctagccaggagagagtctaggcttcctggctcctctccaagtgttctaccactaaaatgttaatattacctttctcagaattcttctgaatcacttgttggcactgtaagtggctttttaaactttgattttgccatttttgagtctgtttgtactaggattttttgctggaggaatttgagctgatttgattacttaaagaaggccttttcacttacctttgctttttaaagttgagtagcctgtgataggtgggaatgtttctgccacctgacatgttagttggcaaagtagtagaggcagcctttaataaaagtcactctggaagaatattagttgggtacttagcattcttggcattcttatggaatgatacaggtttatggcctttttattaagttcttaaaatcaaatgatctttaattagaagcaatcatatataaaactttgtgactccagacaacactggccttactgtattctactatggagtggggtttgtgcctgtaggaatgcaggtttgggttaggggagcggagaaaggggtgtgagaaggccatattgaacacattgtagcctggtctgtgccatctgctcccggctgccttactggtatggaatgtggacatacagcttttgagcctagctgtaccttgcttggcttttagctctcatgattcaactggctgagcttagctttctgttacagtcagtaaggaaaatggagttgagcagcctgttttttgaactcaggtagtcatgaggcttgacaagccatgacacatatattttaatcgccacggccccctctaatgttttaaataagacagtagaggaatatttacattcaaggaacaacaagttatcacaaaactccccccaacatacacagcaagaaaaatgccaccttattctattgtatatgattcttcactgggcaaaaagggctctttatctgaatgcaatctatgatgtcctcagtgaagaaaactaaagggttggtgtgtatgatatcgcattttggtatgaacagattatatatgtttctgtgcccacacctgtacccttgaggagcggtaatagccagaagggatcgtggtgttagagatggcaaagctaaggctctgacaggctctcttaagttaaggccttgacagtgggttttctgagcagaaagcagaaatcacagatggattcaggggccggggagtggtctgcggcattggggagacacatgcaatagtgaaggaactgggttgagacacctactcatccccaaaccctctcttcattctgcacacagtaatcatattagctatggtacaagtttcccataagattttaacatagtaaatgccgtgggagtcagagtcggtctgctgacagggtttttataatggtgatgtacgttgttgtgcattgattttaagacgattcaaaagaaagtagctgctctgtgctcttcccagggccattcagagccagggagtgggaggtgaggccacggagggaaccactcagtgggtttatcttgggcattctgtgcatatgtaactgagaaaggtatgttgttacctaatgtatgcttttgataatttggaccaagagacatggtattctgaatagcagccaaatatatgaggtcaaggtgacttcctctagcaattaggacagctgtcatggaagagtaggccagacctgatttccttcttaagtccgagggctaaaccagtgataagagatgactcgttgatcttcctgatattactggccaagcactttctaaggaatgacgattgataaggaagaacaaactactattttggtctcttatctaaaggaaaatcatgaagctagcactttatagaaaatgcacttattcagttccttgtatgatcacaaatgttttcttagttatttttgggctccccaacaggatatgttacttatagtttgaaattcgcctttttttttttctctgaaatatatcttgaagtgttgagtggtggctaggtgccatatagaacatacaagcagaattttatagaagtatacatttagtgaggggtggagattattgctttaataaatgggactggctggatgtcattcttttttgtccccttcccagtcactttgactctagggtcttgattaatgtgatcatctctgcagagtgtggagagacagcactgggatgggggtgggaagtgggcgcaaagcctttcttagggcacagacagctctgacagcagtttctgggactgccttcccctctccccttcagcttccgcatctgtgacgtgagggagctggctgccagcattcccagcttggcctgccttccagtggctttcattcagagacagcagatcatgttcatctggaagttttcttagttgttcatctcaagaagaatcttaggaattttttttcaaatcagccagttttcctcagattttgcttcttctttatctgccctgttcctttggctaatcttctgtcagcgagacacagggtcatcagtttaagtatgggaaggaaattatggccttgagcacaggcagaaagcatctggctcccaggcgcttcctgtgagccaccatgaaattacaaagactgggcctgacaaggcctttcaaaggagcatctcacaccaccactgtgtcagcatttccatgattccatcgtaaagcagttgtttttcctgatgcttattatgaccaggttggagttggcctttacatgggaagcgtttatccagtggatgagagtgaaacagcaggacagaggtggcgggggagagggctcagattgctctcggaattcccttctccagcccggtcctgaccaagccattcttgctcagaagcctgtggttcctcagaggatgaagtccagactgtctttagcgtgtcaggaccctccacagacttgcccccagcgtctcccaccatatgtgcctatgctccgcgttcctgttctccagccagggcagtgcgggggagtggagggacgagagctgggggtggtgtcaggagacctgggttctggactggggttcctgtctatctagctgagttatttcatttctctctgtctcagtagttactaatctggataggcttaccaaatgagaggaggagaagaaaaggtttaggagacagattacaaggctctttctgattcttgtctcctggcctagcttggaaattagaacaccaaatgtctgagcattaaatgggtttttgaaccatgaagttttttgaacttcttaaaaacaaaaacaaacaaaaagaaaacactgtaggttgggcgtggtggctcacgcctataatctcagcactttgggaggctgaggcgggtggatcaggagatcgaggccagcctggccaagactgtgaaacctcatctccactaaaagtagaacttaaactttttttttttttttttttaatagatggagtctcattctgtcacctaggctggagtgcagtggcgcgatcttggctcactgccacctctgccgccggggttcaagagactctcctgcctcagcctcccgagtagttgggactacaggcgcctgccaccgcgcccagctaatttttgtattccaccccccccccccaagacagagtcttactctgtcacccaggctggagtgcaatggcgcgatctcagctcactgcaacctccacctcccaggttcaaacgattctggtgcctcagcttcctaagtagctgggactacaggcacatgccaccatgcctggctaatttttttgtatttttagtagagacgaggtttcaccatgttggccaggctgttcttgaacccctaacctcacatgatccgcccacctcagcctcccaaagtgctgggattacaggcgtgagccactgtgcccagctaattttgtgtttttagtagagatggggtttcaccatcttggccaggctggtcttgaactcctgaccttgtgatccacctgtctcagcctcccaaagtgctgggattacaggcgtgagccaccgtgcctggccacatttttttttttttttaacgtgggacaccaacatacaaaacagatcaaaagctaggtaaggtggctcacacctgtgactccagcactttgggaggccaaggcaagaggattgcttgagcccaggagttctacaccagcctaggctacatagtgagatcctgtctttacaaaaaataaaaattaaaaaaattaggcgggcatggtggcccagctacttgggaggcttggtgggaggattgcttgagcccaggagatcaaggctacagtgagccatgattgtgccactgtactccagcgtgggtgacagagtgagaccctgtctcataaaaataaacagaaacagatcaaattggacttgctctcttgaggctgaaaggtctgacatgccacctgttgagtcttaaaacctgccagttccatccagggctccccagggcactgcttctctgcatttcttctctcttgctatgcagccaggattagagtcacctgtttgacatgaccccaggcaggggcctagtgtagaagggggagattgtatagaaaagtgtataaagtatgtacgatttgaacaactataaagtgaataccaatataaccactacccaagtccagaaatagaacagaagctccactttgtatttagtattttccttggttccattcgttctgtttcttagcttcttagccttagcttcagtacagatgcagtagataaaataaaagccaatggcttttatatctccttagtctcaaagcaggaatccaaaacactgctttcaaatacagatgataaatatttgaataagaaataatattttggctgggtgcagtaggtgacacctgcaatcccagcactttgggaggctgaggtaggcggatcacatgagcccaggagttcgagactagcctgggcaccatggtaaaaccccatctctacaaaaaatacagaagttagccaggcgcgatggcacatgcctgtagtcccagctactctggcggctgaggtgagaggatcacttgatcctggggaggttgaggctgcagtgagttgtgattatatcatactgggctccaacctgggtgatagagtgagaccctgtctaaaaaaaagaatcttttttcttaataaaaaatattaataataagaaatatgttataataaattttgtttgtttttgagacggagtctcgttctgtcgccaggctggagtgcagtggcacgatctcggctcactgcaagctctgcctcccaggttcacgccattctcctgcctcagcctcccgagtggctgggactacaggcgcccgccaccacgctcggctgattttatttttgtatttttggtagagacgggatttcaccgtgttagccaggatggtctcgatctcctgacctcgtgatccgcccgcctcggcctcccagagtgctgggattacaggcgtgagccaccgcacccggcccccattcattctgtttcttagcttctttttttgtttgtttgtttgtttgtttgttttttgagacggagtctcgctctgtccagcagtggcgcgaactcggctcactgcaagctccgcctcccgggttcacgccattctcctgtctcagcctcccgagtagctgggactacaggcgcccaccactatgaccggctaatttttttatttttagtagagacggggtttcaccatgttagccaggatggtctccatctcctgacctcgtgatccgcccgcctctgcctcccaaagtgctgggattacaggtgtgagccaccggccctttttcttagcttcttaggttggccttagcttcagtacaggtgcattagataaaataaaagccaaccatcctttttaaaaggatatacatgtggtataacttttattacttgcgatagcctgttttgggactggcagtttacagaataatgcaagtgagtagtgaagaataattagaaataatgagctgaaatcctcatgtcatcctaacatgccatcaggaaatagtaagccttactgttggactcgaaaataagctgacccatttttccccattgacagaaatgcctgtttcttcagcactgtcctttgttggcaaggcacatttggctggacgcagcctccactcttcttgcgtcagggacatttatatagagaatgttctttcaaaaagaacttttttcctagtgagaagttttaaaaaaaaattagtagagtataactgcttagaagcaactgctggaataattttataggttttacttacccttttgaaaatcaatgtaaaattggtcttaatgccaggaaatttcaaaggtaagactcggctgtttttttgtatcttgacttggtaagaatctcagctcactgtggtaatggtaattatgctgtgatacctaggcttattggagtgcctccaatttcgaatttgccttggttttgtattccctttgacgtagaatatttttacagcttatcagaatcttggtttttgttgttgtttttcttaatataggtaatccagaaattatgctaaatcagtgagaaagacttcttagcttttgattttgtctttgtttatatttgccttatactttgatcagatagcttaattagaattccatagttacctggtagaaagctgctaaggataaagcttaaggaagtactttggctaaaagcggctccctttattcatcaggggaatttgatttcatcctgtggataacatagcttagaaattctgtttctttgggaccagcctgtagagttctgcaagcctggaagcatgagaactgtggcgggggaaaaatgggctacttgctgtatttagtgtgggctgctaggatggtaaggtagcaacatagttctgtattcccaccctggaattcagaagaacctttaagcagggattgcatggaggtggggaggacaaatcaagaggggcaggaggggacatttgcaaaaattataaatggaatgtcagagaatctttcatagctactctttaaaaattaactttagagccaagagtggtgtggctcacgcctgtaatcccaacactttgggagggtgaggtggtaggatcgcttgagcacagaagttcaagaccaccctgggtaacatagtgagacctcatctctacaaaaaaaattttaaaaattagccggccgtggtggcatgcgcttgtagtcccagctactcaggaggttgaggtggcagaattgcctgagccttgaagattgaggctgcagtgagctgtgattgcaccaccgcactccagcctggggaacagactaagaccatatttaaaaaacaaaaacaaaaaaactttaggccagattattttcaaaacaggcatgcgagttactagcccttgaaagtctactgatccctttgtggtttcctttggtcttctggagtgtgctgcacattgaatttatagagagtatagtgagagctgaatgcgcgtaatcaatatccaagaatctgttgcatgagacgacgtgtttcaagaccagataggcaaacactgaaatcagtctttctaaagatccagatgacccatttcagagactgcctgtacccagagccctagggacatagtgagattccatggctatgaggaaatcttcctctcacattgggtaggagtaagtgtatgtagcctatactagtgggaacaactaccccaccaacactgttctgggcaaatgtcactttcttttttccccttggcaaatcctggttttgcataccatccccacaatgttattattttatttttatgttttttagaggtggagtcttcctgtgttgcccaggctagagtgaagtggcttttcatagatgtgataatggtgcactgcagccttgaactcctgggctcaggtgatcttcccacctgagccccctgagtagctgggactacaggtgtgagccaccacacccagctcaatgttgttattttaatttgcattggactgaaaggtagaaatataattgctatattcaaatggagttttcgtttatgtaagatgattaactccttagactgtgttaatttgttgggtgagtagttaaggtagcagtgtacaacaataaataactcaacggggtaaaagattattattattattttgagatggtatctaactgtcacccaggctacagtgcagtgatgtgatcatagatcactgtaacctcaaacttctgggctcaagcgatcctcctgcctcacccttccaagtagctgggaccacaggcacatgccaccatgcctggttaattttttattttttttcttttattttttttgagacagagtctcactctgctgcccaggctgaagtacagaagtgtgatcttggctcactgcaacatctgcctcctgggttcaagccatcctcccacctcagcctcctgagtagctaggattacatggcatgcaccacctcacccagcgaatttttttttttttttgtattttggggtttcaccatgttggccaggctggtctcagactcctgacctcaagtgatctgcccactttggcctcccaaagtgctgggattacaggcgtgagccaccacacctggccaatttttaaaatttttgagacagggttgcactctgttgcccaggctggagtgcagtggtgcagtctcagctcactgcaacctctgcctcctgtgctcaagtgatcctcccacttcagcctccccggtagctgggacaacaggtatgcatcaccacagccagctaattttttgtattttttgtagagaaagggttttaccatgttacccaggctggtcttgaactcctgagctcaagtgatccacccacctcagcctcccaaagtgtagggattacaggtgtgaaccactatgcccagcctaaattttttgtagagaagggttctcactggtcttgaactcctggtctcaagcagtcctcccaccttggcctcccaaactgctgggattacaggtgtgagccactgcgccctgctcgattattttcatatttgattctcagagtaaacatacagcttgttgataatctgagccccgactgcccatctcatcttctgtctcccattcttggaaacccttttccagtcaatctgtcccaaaacatgtttattgctttcccattttagccactattattcatgccttttatgtcacctctccaaactctgccagtcttttaagaaccaattcaaattttacttctgcctgatgcctttcccacttactccagattgaatggtttttctttctctggatcccaggaaatggtctataccatttattgtcttatggtttggctattttttttaagtgtaaatattgtatctcaagtaaattataagatcctcgtcagcaaagacagtacccattccttttgtttcatcacattttctttgctatgtgagtatgcatttgatttgggtgatggacagttcagtccttaattccaaagattatggtaatacaaaaatgattaacactctgaaatatgcagaaaggagggaatttagctgctgtataactagatctatcaaatggggacctttctcttttactcagctttagagattctgttgtccttgttgagtttgatggaatccttctgtaagatactcttcatgtggtaaacagatgagtagaataggggtattgcttcagattctgacaaatcatacacagaaaatgaaaatgccctctatgtctcactcagattcaaaaagattataatccccttttacacctaaatgccctaacacatcatttttgcatattactaattaaggttctctaaattcatctggattttacagatgaatgaattggatgaataaggaccttgaactctatttccaacttttcttctctaatttatctttattcaaaaggaaaaacaaaaaccctaagaaaatttactttagcatttattaatatgaaaatggaagcattgggttttaagaaaatgttttgcttaaattcagtggtttaataagccagagaatagtgttcccttcttttctttttttttttttttgagacggaatttcactcttgttgcccaggctggagtgcagtggcactctctctgctcactgcaacctctgcctctagggttctagcgattctcctgtctcagcctcccgagtagctaggattactggcgcccaccaccatgcctggctaatttttgtatttgtagtagaggcggagttttaccatgatggccaggctggtctcaaactcctgacctcaggtgatccacctgcctcggcctcccaaagtgctgggattacaggcatgagtcaccgtgcccggccagtgttctcttcctttttttttttcttttgagacagagtcttgctctgtcgcccaggctggagtgcagtggcacgatctcggctcactgcaagctggccttccaggttcacgccattctcctgcctcagcctcctgagtagctgggactacaggtgcccaccacctcgcccagctaattttttgtattttttttagtagagacaggatttcaccatgttagccaggatggtcttgatctcctgacttcgtgatctgcccacctcggcctcccaaagtgttgcgattacaggcatgagccactgctcctggtcgtgttctcttcttattgaaacttttatatcccatccttcctggcctatttggtaagtattaatacattcctctggaaaacttccatgtctacctgacatggaaagtgcttcctacatagatatatttcttgttccacccctcccaccccccaactgagtcttttcaagtgtctaccaaatgcaaacattttaaccagctgctaatgggaactcatagctttgaagacttagaaatgtaagatattgagaaatacgaggttttaaggaggtttgaagaatgcttttttgctttctgttagttacgatgtatatttccatttatttcccctattgagattaaggaaaattgtgataacaagtattttacttcctttgcttgtagttctgtatgaaattatttccttacagtgttactagttggtggtgttctgtatgtgattatttgaaactcagtgtgttttcagaagttgttgaatattctcaggtggagatggtcatttttattatggataatggtggaagatttttgtcttagggggcattctagattacagagcacacaaacatttcctacttcggggagagagggatgaggttgctgtgttggaagagtgatacacacgctgtgttggaagagtgatacacacacttccaggcgtatgctgatagagctgttgacagtatgaactttcccagtcatagtaaatctgggatcacggtggcatttctaggtcctacaaaaatgtgtgctatcttgggaatgttaccacttcttgccctgagtgtttcatagaggtgttaaaaaagaaaacaccctccttctaccttccagttgcggcactctggtggggaccttgtgtcttggttaaacaaatcacaaacaactctagatgcttggtgacagtctgaagaaggcacgtagatatttgcattatgttttattacagcatgtatttgtgactgagaaaccaaaatacttctgaagtattttcctctctgaagtagttgactcttggcataaaatgggaaactttgaagtcctgtgtttctgtttttctaatgaaatatctctgtacagctcaaagataaaagtaattaccatttttaaaggatccttctttcccctctgttttaactcttccatttaaaaaggattagcactggaaaattattagaatggacattcagattctgttgtgtatcttagttgcctgctaagaacactggttcccatcacatttaaactctaaagacattgtgaagtctggatatgcccggtctcctactttctctttctttgtggccttcagatcattaaatttagtgactcagctaattttttttacccacctcttagaactaagttgaatgtatttgtgaccaagcacttaaagttatttcctctaaaccaagtgtttgagatgtttttagatttataacagtctttgtttaccgtgtaattcagtccaattgaggaactagtaaaactgcattatctagacatcaaagctaagaagagtatacttacaccaagaaacttattaggtttctaacaagtggaaagttaccaggtgtcccaaaattaaccacttccatgccagctgattttcactttttgtagctattttaatgatcagcagcattctgggtttaaaaataacagtcgtggctgggcacagtggctcgtgcctatgatcccagcactttgggaggctgaggtgtgagtgggaggattgcttgaggccaggagtttgagaccagcctgggcaacatagcaagaccccatttctaaataataataataataataaattagccaggcatgatggcttgcacctgtagtcccagctacttgggatgctgaagtgggaggatcacttgagcccaggagttggaggctgcagtgagctatgattacagcactgcactccagcatgggtgacagagcaagactccatctcataaaataaaataatcagttctacattattcagagttgagtgttgctttctttagcatccttcaaataactgaaaatatgccattaaaaaatataaccaaggtgttgaatggataatacattttagttcatttcaaaatagagccaatatctttatttcttgaggtttgagagcaggctggtgttttgttctgtttttccttcagatttctgtgaagggataaatattagacccactttacagagaacagttgagtcacagacaagggatgacttgccaattgcatgcagaggtcactttaagtaggaccagtgctaccaagttgcatttcaagattggtaaccttaagacctgacagaccctggggtcaggaattgatagagaaggactctgttagatgaggacccatgacttcctcaacccttcatcagcactcctgtctgaggctctgttcaacctaagtttcttcatggattgaaacaaaattatatgtgcatattacagagtaattgattgtgtacagatgcttcctttaggtatttcagaggatgtgtgtaaacatgctttagatattcataagcatcttataattttgtttatgtaagcaatcgcctagaaaagtagaggatgcgaaaggtttgtttttctttcccgtggataccttgcttgttcctgctgaattctagaacatggcatctttaggaacatgccattatctggaggcaattgcctacagtcattgagatttttctttttaaaatgtagtttttgcatactacgtctagtcacattttgtttccatagagggtttggctttctgggatatcagaaggaagctatggatgtttggaaaaggtctgtgaccttttgaggttatcatcacaggggacaattgcactctcccattcattgctccctggtgtcagtcagaataatgcgtggtggtctgacttccagtggcatttcttatgcaataggcttacaaaaacataatgaggtcatggcaagcctaggttcctacagacataaatgagattcagaagaaaattgctctgttcatttcagattctcctctttgtgattgtcttgagagaatgttcatttggctgcaggttcagtgcttgcacagttatattggagtatctaagtaaactgaagtgcagcataaactgtcgtagctggaaagttgctaaagactgtaagccataacagtttgtttaacttaagctgttaaaactttaggttctttaaggtgccatttttttggccacattctgtggttccccatagccttcaggaaggaatccaaactcttttttttttttttttttttttttaagatggagtctcgctctgtcgcacaggctggagtgcagtggcgtgtctcggctcactgcaagctccacctcccgggttcactccattctcctgtctcagcctcctgagtagctgggactacaggtgcccacctccacacccagctaatttgttgtactttcagtggagacggggtttcaccatgttagccaggatggtcttgatctcctgacctcgtgatgcatccgcctcggcctcccaaagtgttggaattacaggcgtgagccaccgcgcccagcgaaggaatccaaactcttaaagtggtttgatccagtccctggttccttgctaatgcatcttacccattctttccccacacacactttgttccagttggttctcccaactggcagtgcttttttttgcggagggaagggtctgtgcacactctgtccctctgtcttaaatgcacttcatacttcaggtctcacctgagatggaacttcctacagaaaggctttcccgaatctgaaaggctgggcttggggaccttttaatatgctgaatcatcattcagttattgattctttcagtgaatatttgtgtcaagcactgtgtcataggctgaggacacagaatagaactaaacaggggacaggcctcacagagcttgcattcttgtcagggaaaccatctcgtatttacacacttaatttttttttatttggaaatgattgaaaacttgtaaaaatagcacaaaggaatatcctatatgctttacccagattcatctatttttttttttcagattcatgtgttgttaacaatttaccaccccatttgtgttcttactctttctgtatacataatttttccagtgggatcagttacgtacattatggcccttcccctcaaaatactaaggtgtcagtttcctaaaagtggagacattttcacatgatagattttatagatttacattgataaaatattttatttgggaggatttatccttcctgcatttcttttttttttcaatcttttttttactgtgttaaaatacacaaaacataaaacttgccattttaatcatttttaactatacagttcagcgatattaaatactttcatgttatgcaactatttctgtaacactttccatcttgtaaaactgaaactctgtacccattaagcagtaacttttcattcccactttccccagcccctgacaaccactgttctactttctgtctctatgagtttgactactcttaagtactgcatataagtggaatcatatagtatttgtctttttgtgactggcttatttcacttagcacaatcaagattcagccatgttgtcagaatttccttccctttaaaggctgaataggccaggcgtgatcgcttacgcctgtaatcccagaactttaagaggccaaggcaggcagatcgcctgagcctaggagtttgaaaccagcccgggcaacatggtgaaacctcgtctctactaaaaatacaaaagttagctgggcacggtggcgcatgcctgtaatcccagctactcgggaggctgaggaaggagaatcacttgaacccaggagacggaagttgcagtgagccaagatcgcaccactgcactccagcctgggctacagagcaggactctgtctcaaaaaataaaataaaaataaaggttgaataatattatattgtatgtatatatcacattttgcttatccattcatgagtaggtggatactttgggttgcttccatgttttgttgttgttgctgttttgagatagtcttactctgttgcccaggctggagtgcagtgatgagatctcagctcaccacaaccactgcctcccaggttcaaatgattctcctgcctcagcctcccaagtagctgggattacaggcacatgtcaccacacccagctaatttttgtatttttagtacagacggggtttcaccatgttggccagactggtcttgaactcctgacctcaggtgatccgcccaccatggcctcccaaagttctgggattacaggcgtaagctaccacgcccggcccaggttcctgtttttgcagtgggtttataattcattaccatacttaattattgtggcgctcaaattgtcccagagttggccagtgggagccccttcaggctggcttctgtgtccttgtgagatgctccatcgttttttttcttgcataaaaagatgttccaggctcattttgtccctatcctgccctaaccctggaatcagccctttttccagggagccctcacacccttgttttagcacttagcacactgtttacttatgttttcctccactggactagattgtacctctctggggacacatagatgtgagtcttacttgctcttgtatcttcacccagcacaaggcctgacacatgagatgtttactaaatatttgttgaataaaaaattaatttttactgtagttaattgattaaaatttggttctaaaattatgatgctgatgggttttctttttttttcccccatctaggaagaaatgttggctatttggcgatgagaggtggtgaacagtgaccatactggtatacaacactatgggacctggcatttttgctgcatgtccagcccacccccactaataatgtaggaagctgtctggtccattggaaacactaatctgatctcagaagtggctgatcgtggcaggatgtgtcgacgatgatgatggcaagaaagcaagatgtccgaattcccacctacaacatcagtgtggtgggattatctgggaccgagaaggaaaagggccagtgtgggattggaaagtcttgtttgtgcaaccgcttcgtgcgcccgagtgctgacgagtttcacttggaccatacctccgtcctcagcaccagtgactttggagggcgagtggtcaataatgaccactttctctactggggagaagttagccgctccctggaggattgtgtggaatgtaagatgcacattgtggagcagactgaatttattgatgatcagacttttcaacctcatcgaagcacggccctgcagccctatatcaagagagctgctgcgaccaagcttgcatcagctgaaaaactcatgtacttttgcactgaccagctggggctggagcaggactttgagcagaaacaaatgccagacggaaagctgctggttgatggttttcttcttggtattgatgttagcaggggcatgaataggaactttgatgaccagctcaagtttgtctccaatctctacaatcagcttgcaaaaacaaaaaagcccatagtggtggtcctgactaagtgtgacgaaggtgttgagcggtacattagagatgcacatacttttgccttaagcaaaaagaacctccaggttgtggagacctcagcgagatccaatgtaaacgtggacttggctttcagcaccttagtgcaactcattgataaaagtcggggaaagacaaaaatcattccttattttgaagctctcaagcagcagagtcagcagatagctacagcaaaagacaagtatgagtggctggtgagtcgcattgtgaaaaaccacaatgagaactggctgagtgtcagccgaaagatgcaggcctctccagaataccaggactatgtctacctggaagggactcagaaagccaagaagctgtttctacagcacatccaccgcctcaagcatgagcatatcgagcgtaggagaaagctgtacctggcagccctgccattagcttttgaagctcttatacctaatctagatgaaatagaccacctaagctgcataaaagccaaaaagctcttagaaaccaagccagaattcttgaagtggtttgttgtgcttgaagagaccccatgggatgccaccagtcacattgacaacatggaaaacgaacggattccctttgatttaatggataccgtccctgcagagcagctatacgaggcccacttagagaagctgaggaacgaaaggaaaagagttgagatgcgaagggcgtttaaagaaaacctggagacttctcctttcataactcccggaaagccttgggaagaggcccgtagttttattatgaatgaggatttctaccagtggctggaggaatctgtatacatggatatttatggcaaacaccaaaagcaaattatagataaagcaaaggaagaatttcaggagttgcttttggaatattcagaattgttttatgaactggagctggatgctaagcccagcaaggagaagatgggtgttattcaggatgttctgggagaggaacagcgatttaaagcattacaaaagctccaagcagagcgtgatgcccttattctgaaacacattcattttgtgtaccacccaacaaaggagacatgccccagctgcccagcttgtgtggacgctaagattgagcacttgattagttctcggtttatccggccgtctgaccggaatcagaaaaattcactctctgaccctaacattgatagaatcaacttggttatattgggcaaagacggccttgcccgagagttggccaatgagattcgagctctttgtacaaatgatgacaagtatgtgatagatggtaaaatgtatgagctttccctgaggccaatagaggggaatgtcaggcttcctgtgaactctttccagacgccaacatttcagccccacggctgtctctgcctttacaattcaaaggaatcgctatcctatgtagtggaaagtatagagaagagtagagagtccacgctgggccggcgggataatcatttagtccatctcccccttacattaattttggttaacaagagaggagacaccagtggagagactctgcatagcttaatacagcaaggtcaacaaattgctagcaaacttcagtgtgtctttctcgaccctgcttctgctggcattggttacggacgcaacattaatgaaaagcaaatcagtcaagttttgaagggactcctggactctaagcgtaacttaaacctggtcagttctactgctagcatcaaagatttggctgatgttgatctgcgaattgttatgtgtctgatgtgtggagatccttttagtgcagatgacatactttttcctgtccttcagtcccaaacctgtaaatcttcccattgtggaagcaacaactctgttttacttgaactaccaatcggactgcacaagaagcggattgaactgtctgttctttcataccattcctcctttagcatcagaaagagccggttggttcatgggtacattgttttttattcagccaaacgtaaggcctctttggctatgttacgtgcctttctttgtgaagtgcaggatattatccctattcagcttgtagcactcactgatggcgctgtagatgtcctggacaatgacttaagtagggaacagctaactgagggggaggagattgctcaagaaattgacggaaggttcacaagcatcccctgtagccaaccccagcataaacttgagatctttcacccattttttaaagatgtggtggaaaaaaagaacataatcgaggctactcatatgtacgataatgctgccgaggcctgtagcaccaccgaagaggtgtttaactccccccgggcaggatcaccgctctgcaactcaaacctgcaggattcagaagaagatatcgagccatcttacagcctgtttcgagaagacacatcactgccttctctgtccaaagaccattctaagctctctatggaactggagggaaatgatgggctgtctttcattatgagcaattttgagagtaaactgaacaacaaagtacctccgccagtcaaaccaaagcctcctgtccattttgaaattacaaagggggatctatcttatttagaccaaggccatagggatggacagaggaagtctgtgtcttctagcccctggctgcctcaggatgggtttgatccttctgactatgctgaacccatggatgctgtggtgaagccaaggaatgaagaagaaaacatatactccgtgccccatgacagcacccaaggcaaaatcatcaccattcggaatatcaacaaagcccagtccaacggcagcgggaatggttctgacagtgaaatggacaccagctctctagagcgagggcgcaaggtttccatcgtgagcaagccagtgctgtacaggacgagatgcacccggctggggcggtttgctagttaccggaccagcttcagcgtggggagtgatgatgagctggggcccatccggaagaaagaggaggatcaggcatcccagggttataaaggggacaatgctgtcattccatacgaaacagacgaagacccgcggaggaggaatattcttcgcagcctaaggaggaacactaaggtaagacaccagtctaggattagtcatagtgttttgtacagcgtctcggtgagggttgattgatgatgatttttcaaggacaacctattctggtaaaaaaaaaactgccctgtgtgtgtatttgacttaacataaaaaagcagtgcctcaattagctaccattattggcagctctcaagtagttaggactttggatagatagtctgagttgttgttgcctaaaacaatagttaattaattagcaaaatgaggagataatgcagaacttgtcagtgtcttgacaagtggccaagcgcagtgacaatacacttgctctcccttcactgaaacaccagaactcaaaactgcttgccgcagtctctcactgctaaacataacatttcatccatacatctcttaaatgatccttcctcccttgctgatctgtaaaggttgctgcatttgagattggtgaaggattggatgatgatttgcacacacaaatcagtgacgagtctttgagtacataaatgaaaaaagagaatcttgccactgagagttataaacctgtcccgtatttgttaaattggaataccatccagtctattattttatcttcaagggagttgctgctgctatcagtcagaaactcggattttatttagggatcacaaatggtgcagggagagaaaagaaaaagttaactgtatacattataaacattgggcctactcgtcatatgtagagacaggagcaaatgaagtctcttttttttttttttttttttgagacggagtctcgctcagtcacccacgctagagtgcagtggcgcgatctccgctcactgcaagctccgcctcctgggttcacgccattctcctgcctcagcctgctgagtagctgggactacaggcgcccgccaccgtgcccagctaatttttttattttattttattttttagtagagacggggtttcaccgtgttagccaggatggtctccatctcctgacatcgtgatccgcccgccttggtctcccaaagttttgggactataggcgtgagccaccgcgcccggctgcagatgaagtctcttatcctgcgtagaattgtagtttgtagtctgcagggcagagagctgtaagcagtactctgtccccttgggtttaggctttgagaaagaaaaagcgtttctcaactttttctttttcttttttttttccatttggagtagggagaaatactcttcccccccacccccaattgccaaggctgatttagaaatactgaaatactctttacaggccaggcgccgtggctcacgcctgtaatcccagcacttttggaggccgaggcgggtggatctcttgaggtcaggagtttgagaccagcctggccaacatggtgaaaccctatctctactaaaaaagtacaaaaattagctgggcgtggtggcaggcgcctatagtcccagctactcaggaggctgaggcaggagaatcacgtgaacctgggaggcagaggttgcagtgagccaagttcacgacactgtattccagcttgggcaacagagggagactctgtctcaaaaaaaaaaaaggaaaaaggaaaaaaaatgtgtatatatataaatactctttattttttcagaaaaagacattttggtgacatgccacaacagaactgtgttatataataatccttcaccagcagattatgatatatagaaggattttttcacgttaaagcttttgctactctccctcccatgaaagaacagagaacagagttacttgtctgaaagtactgcagggacctctggaaagaaagattgccagaaacttttattattacaaatcctaccaaatcagaaggttctagaatccaggctgtcttgagagctgacaatcctgacaactctgttgtaaaatgtaatacagaggccagtttggcagccctgcgggccccgagagatggaggaacagggtgccatcaccctcccacagaaattgcatccactttgtgctacatcccatagtagagagtgttcctgcattaccgctgaccaggagcttccagagttttctcatctgtgcagtgtgagaaagggcagagtggttctgtatccctccccacctgtgctgactattaataaatgccataggcatcctcctgtctgattttcctttgcctggcttttctacatggagtcctttgtctgcctccagtgttttctcctccaaaggttggtaggaggccaccctgtggaaagcattgcttatttaggaagccagaaaacggcctgacttgcctccggtattttcccagagctcacctatttaatgatactggaatccaaacattttgaacatttcttctcttcctcctcctctcccaatgaagactgttgccagaacagcttaaaaatgctgacagtcttctaatttgtgggggtgtttgcacacctggaaattaggaaggtggcataatagcatactgaattataactatattctgacttctagctacatttttaatacttactgaaaatgatgctttaaaaacacattcccatgcaagccaggctttaaagagcacacactgtagtggaggctcagcagaaaacagctgatcacagtgtgcctctaagatagctgtgttcatgctggtaatgagcacttcctaacctgagacttccttccccgggttgctgggtcagcgtgcaagaagtggtcggcttccggtctatctttagctatgtgggccacacctcttcaagtcaaataaaaatgatacttctggcccaagagcaatagcgtgccagaagtcagttatggagtatcctctggaaagagtgactagaaggtgaaattttcttttcctgccttggaaaatggtgctttgaaatgagggtagttgctttgtcatcccagtgcagagatgagcaaatcctttgccgctagagcaaacctcctattaaaattgctgcagttcggaacacagactggcacttgttttactggaaaagcaagatgccatcaggggagagaagggccaagccaacccctgtgtgggagatttggcctttggtttttattggcatgacaaagcaatacaatatttatttggagggagggggcagctaggcactaggatttcagttggtaagggaaaatacactgagtacctcctgcgtgccaggcaccatagggaaatgacacagacccttcttgcccagaccttagtacccagttgaggcagcaaggcctacacagccactgaaaataggtggcctgcccagggaaggctatgtgtgggcatgtcgggttagttatgttagagtaggttgtagtgattaggagctcaggctctgggaatctgggctacagtcaactccagctcctccgcttccttagttggactttgggcatgtgagtcacttctccacattctttctgcaaaagagggagcaccttcctgatcaggttgtgagaaatgaacaccgggcgtagtgcatgctggataagtgtcagctgtcatcatttaactagaccccagagaatgagtggaactaaagcagtggcatgaggtaaggaaggacttgaaggtggaaatatgcatattgtattccgagaaaggagaaaacttgtctggtctagctgagggcttgagggaccaacattatccgtcccgtcttttggaagttttaacctcatgcattactgagctgctttcttggtacttaccctagcaaccaccctaacaaaaaaatagctatgctctgggtaccaatgtgatacagaaaaaaatcactcagtgcccttggctgatttgctagattaggtctttactataaaactggagtcggagtgagggaatcgctttcatttctcctcatgaaagtgcagactgtaaagctgactctcattctgggtgcttttcccagctgaaccatttagcaacccaccctcatagtgggagccttccgcactcagctgaatgaaattgaaaatctacgattgcacttcagtagggtccatgaatagtggctttgtctgtaaagagttgttgttgcacatggtctctgtctcccagtgccatgcgtttgcaaagacgagatcaggatcggcagggtcttattttaaagccaaaaaacaggctggggagccttgttccacaaagtatgccttttggtcatgctgaaatggctgcgtttggtgtgtttgactgtggatttaaaaagaagacattattggctatttacccttctatctgatgtgttcttattttggtgctaaaaaaaaaaagacaaaacagaatgataaagaaaatctttcactcactgcagcaaccacatgacaagacaacctattgaaaagctaaccaattcaatcatgcattgtttggtctataaggcaccaagtaaccagtttgacagtttgtgtccccccctagtgaattggcttatttcattggattcagtgaattggctggttgttgtggctttgtgtggacacagctctcattttgtgaggcctagaatggagttaaagtttctagtgtgaataaaaaccagctggggaattggactgcttgctcccctgggagggatgttgagttttgacagacaagctgaatgcgatgaaatatgagctctttgtaacctgcctaggaaagactctcagtgtgtgcttcagaaatagtcctactcaatgagctttgagaccaaatacataacttggttttaaaaatggggtgggcacactgacttgaccttggattttctgtttcctggaaaaattgtgtcttttaaacgaggtacttttgtttccaagccgaagttcagtcattcttttaggaaggagacatgcatttcggtgcgtgggcattcagtgagcacttgttttatgcccagcattgtgttgggtgccctaggtgtggtagtgacgttaatccagcttacagtcttggggatgttaggttttaaacatgtacttgcatgcattttgaatattaccagagggaaggtacaggatactaaggaattgtgtaacaaggaagtttaacctaaactgcggtatcaggaaagctccccaaggaaatgatatttaaggctgagactttggaagctgaggcagacaaagtcagtgaggatggaagcttcatggagctgaaagaacttcatgtgttcaaagagttgaaagaagcttagcgtggctgctctggagaggtgagggggacccacgccaaataatagagggctgtggctaccacgtgaagggttttgtgtttttgtgcatttattgaatacttactgtgtgccaggtacgtgtcaggcattttcacatcaattttttatttattcctcctcccagtcttaatgaggtgatgtttttcatccttgattttgagttgaggtaactaaggctcagagagattaaaccttgcccaagtgagtgtagccactgagtggaagagctgagattctgaaccctggtgttctgacttccacttcctgtggattttcatcatccagtctgcagaaaagttgctaatattcaacagtcaggtgcctatatttagaccactcaatcagtccagtcgatttgttcattcaaacaaaagatctttgattatctgaaaaaatccatttctcctcactgccccccagaacagcacggtgctgtttgtttctagcttcagagcctagttgagtagaggacaaaaaaggcatggagacattgaaatagcaactggaactttgagaaattgtttctcactggtgtcactcgattctcagtttattttaagcctgaagaacttctgtagtgtgtttttggtgataaaaatagactatctttaactatctgccttagcttacagcatacctgttcttaaaaaaaaattacgataggcaacccaaatctgtttttaaaagaactgggaattgtgctgatgcctcactgagccaacttggtctcctccaccacctggtgatactgaaatacctttgtagggactcaaattattccagctctagtcaggaatcacctttgcttataaggcaaaggccttccaaatggattttctacagcatttgagagaagcaagcaataagaactgacccatagcgttggaaagtccaaattcagtgtgtgttgaacttcaggcaagtgttcatgaaaatgtacctggaactagtgggccctcctcgctgtttggctccagatcacactggccacgagttgtcttctcgggggggtggatccgcggtcaccagacttcatgccttaatagaacaaaaagctatggtctgcgctgggcgcggtgggtcacacctgtaatcccagcactttgggaggccgaggcaggcacatcacttgaggtcaggagttcgagaccagcctggccaacatggcgaaaccccgtctctacaaaaaatacaaaaattagccaggtgtggtggtggacgcctataatcccagctactcgggaggctgaggcaagagaatctcttgaacccgggaggcagatattgcagtgagccaggatcatgccactgcactccagcctgggcaacagagggagacggtctcaaaaaaaaaaagctatggtctggatttagttaggtcctgcaataggatgacatgtctccgtttctttctccattatttaagattagggatgacaggaaggccaggactttgtggtccttcctgttcatccgtaaataaagatgctccaagatggtgagtgactgagtcatggtattaactgccagcttgaaggagaccatatctaagcatttgtgctttaataatagattttgtcagcaagaatacatctgccttcaggttttcttttaaacttgggcgtggaatttttcagagcccagaagggggagcaccggttaaccaagaatacatttggagcataagcaaataacttaattaaaaaggtccttttggaactcttttggaaatagaagagaataattgccaatcagaaaggcacgatgttgaatactgaatgcaagaaagtggtttagggaacagctgtagtaatgccacttatggaatctttccgattttctaagactctaccagttacagttagtccatagtatgctaccacacaacttggcaagccatgggtgtgaccctctggggctctgtgtattgatttcactctcatcctcattcagatggcactgtccatgttccagactacattccgtatatggtgttacctgttactcttttttttttttttttttttttttttacataaaacattaacgccgggcacagtggctcacacctgtaatcccagcactttgggaggccgaggtgggcagatcacttgaggtcgggagttcaagaccagcctgacaaacatggagaaaccccctctttactaaaagtacaaaattagccgggcttggtggcacatatatgttaatcccagctactcaggaggctgaggcagaagaatcacttgaacccaggaggtggagtttgcagtgaaccaagatcgcaccattgcactccagcctgggcaacaagagcgaaactccatctcaaaaaaaaaaaaaaattaaaaaaattttttaaaagttggggtctcactatgtttctaggctggtctcaaaactcttggccttaagcagtcctcccatctgggcttcccaaagtgttgggattacaggcatgagtcactgcacctggctggtgttaactgttttttaaaaaggccagacatggtggctcacacttgtaatcccaatgctttgggaggccgagtttggcagattgcttgagcccaggagtttgaaactagcttgggcaacatggcaaaactccgtctctacaaaatattatctgggcgcggtggcacacacctgtagtcccagctagttgggaggctgagatgggagaatcacctgagcccagggaggtcgaggctgcagtgagccatgattacaccattgcactccagcctgggcaacacagtgagacgctgtctcaaaaaaccaactagaaaaccgagttccgatgcctggttccccaccaccccacctgcttccagtccagttaaatcaaaatcactagggctggtgtccaggcactttgaaaaaaaaaaaaaaagacaaaaaaaggcagtgaatccaacaggctgggttctgttttttatttcctttattagatgtgttaccaagcatttaaaaggtttaaacggctatactagatggtacaactctagtgaacatattttctgactctaaaatctagataagtaactttacatttataaggttgtttatggagaccaaaagagaatatttgaagttgacagcgtagggtcagtaagtagccctccctgctgttcccacagaagatagaatattcttacctttttccattgttgcatagctggtacttgctcatgtggtacctagatgagctttgtttattgtggatatgtcttctgttaccaaatagattggaagttcattgagggcgggagacgactttggtcctagtattagctctgctgccagtttgttatgtggccttggggtgattcataaattcattaaaaaaaaacaaaccaagactcttgccttctaggaacttagcctagtagaatatttgttgtatgtgtacgtaaataactgtacctcattcagtacctacagagggaattaggacttcatctggcggtttttaaaaggcttatgatatagtactgccaaagtatgaacaaggccttctgagcctcacctcctcacacactagtgtgagcagcacagtgtaaggagaaatgagaatctctaccacagagatagtctgcgtctcagctcaatttgagaaaatagaaaggaacattggcccagtacattattggaaactgtttttgttcagcaaatacattgagtgcccactgcacgtcaggccctggaacccaaccatcttcccagctgatagaaggcccttcttttggctcttacctatcccctggcttccattctactctttttcttgccccagtggacttggacagggtctgtggactgggcttacagccgagtggggagcagaggcagtgacagatgcagcttcctactctgccacagtcgggagtttcctctttatgccctgtgtctgaaaagccgagagaccagaggtagttgccaggcaccatttctccccagtgcaccacgggcataaactattatttataaactttgccatgattaatatcaagaccaaaaatcaggtgtgtttttaagcaaactatgaggtacaaagcaatggactatgttgttcatttttttaaaatcagtctaaaaggccaaggtgaaggtgtttcaggctggcccagtcctttgtgtatggcagtggcatttcttcgtggaggagatagaccatgcaggggaaagagcatggggctttggcattcaaagatcaccgtacactaagtgctggctgtgaatctccatgagtctctgttttctcaactgtaaaatgggtctaaataacccttaccttgcagagtggtcgtgaagttttgaataattgtgcagagcagctaccaccatgcccagccactcctagggaatctctgttccatttttgacccagttggactctaaacttaagaggtggccgggcacggtggctcacacctgtaatcccagcactttgggaggccaaggcaggtggatcactggaagtcaggagttcaagaacagcctggccaacatggtgaaatcccgtctttactaaaaatacaaaaacttgctgggcatggtggctcatgcctataatcccagctactcaggaggctgaggcaggagaatggcttgaactgaggaggcggaggttgtagtgagccaagattgcgctacggcactccagcttgggtgacggagtaagactccatttcagtaaaaataaataaataaacttagaggcacacatgtggagattgttctcagggattgaattcctctggctagatgcttttttcagttcagcctgctaataggtaagtgcctccggaagaagatggatgttgggtgttgttactttctccttttcaaggacctgttgctgaaagtgcacccaataactccctgaagagtgacacacgtctgactgggggcatgagatatctggcaggccactcaggagaatggcatttccatgagaaatatgcccagtaacccttcagatgcctgaagtgttgtttctatcagcagtctggcccagctcttggcatgcaccccaaaccctgattttcttactaggaaggtttagaattcattttgcaagagttccaattttgtgacaccctagagagccttcagttatctcaaggaggtattctgaaattctgtaaaccagagtttgtcttaaaaaatagggagtgagattgaatccacgtcactcagcaaggaggtggggtgatgctactgcaaaagcttaccctccacatccactgttgtaaatggaaggattgaactaaatctggggctctttgaggtgaaagagataggagcagttgtctcagttagccttccgtctctcttatcgctcccaatgtgaccctttggagccatgtaaaagaagcctgctctatagtcaataggtagctctatagctatttgaaaatagctatcagagtgccccattattctctttgccaatttaaagttccctggtattttatatgagtggatctttattacctttagaaacctttggaagtcctccagataatcagtgatcagtgtgccttcttttttttttttttttttttttccgagacagggtctcctgctatcacccaggctggagtgcagtggcacaattttgactcactgcagccttcacctccccagctcaagcaatcctcccactgcagcctctcgagttgctgggactacaggcatgcatcaccacacccagataatttttttgtaatattttttgtagagatggggtttcaccacgttggccaggctggtctcaaactctggcctcaagtgatctgccaacctcagcctcccaaagtgctggaattacaggcatgagccaccaagcccagctagtgtgcttttattcacttactcagtcatccatttatttattctctccatctcaagaattttcactagattataagccgtggtggttaaaagcacaggtttcgcagtcatacagacctgactttgtcaagttactttttctaggagttggcctctatcaaatggagtttttaatacccacacccacaaatattttgaatctggagtgcttgtaaagaatttatactggctgggtgcggtggctcatgcctgtaatcccagcactttgggagtccgaggcaggagggtcccttgagcccaggaagctgtggttgtagggagctatgactgcgccactgcaccgcagtctggatgacagagcgagaccctatctaaaaaagaacttatgctaggttctggtacacagaaactactcagttgatgaaggctaaatttcctggctaagttagattgttagaacacaccagcatcatcttgttcctagtattaagagggtgggggaatgtaagattgaaatttgttgtctgtttcctagaaccatggttagaaggaggctttaaggtgattaggaatagcttctttgcagcttccatttctgttccttcacagcggtttatttggaagcctgttttattgaacagtgctgttagtttcaacaggcatattctgtaggatttgagattgttaaaaacttcaatgatagaagatggatgaatgtgatttaagtacagatgctctttggttattcagattgtatagctaaccttttaaactccaaatgtaaaacttttcgacttttaaccttttaaactttaaattaaaaaaaaataggaaacattttaagtggggagagcattgtttgaatcattgttatctggttgcaacaatgtgtgaaacagaggcactcagcccctcttccccaccccgcccctcctcccggagacacagtcttgctctgtcgcccaggctggagtgcaatggcacaatctcggctcactgcaacctctacctcctgggttcaagtgattctcccacctcagcctcctgagtagctgggattacaggcacttgccatcatgcccggctaatttttgtatttttgtagagacagggtttcactatgttggccaggctggtctcgaactcctgatctcaggtgatccgcccgccttgccctcccaaagtgctaggattacaggtgtgagccaccatacccggccagccctcttatttattattttgagacggggtcgcactttgtcacccaggctggagtgcagtggcacgatctcagctcactacagcctcgacctcctgggctcaggcgatcctcccacctcagcttcccaggtatctgggactataggtgtgcgctaccacgcccagctaattgtttttgtattttttgtagagatggggtttcaccatgttgcccaggctggtcttgaactcctgagctcaagcaatttgcccacctcagcctcccatagtgctaggattacaggcattagccaccatgcccagccttaaattctttatgttatacttcatataagtagaagatgctagagacacagtatagactcgttaaattatttcctgtaaatgtatatcatacatcgttaattggcatttccttacttctttggtaaaaaaagtctgaagtcagagcctgtttgcttcagtctataaggggagcaagcagcagccattcccccgaacctaggaggctatgccactactttatgaggagcaggtatctcacagtgagtggggacaggctttatggagtacatggttcttccctgagaccccagaatccattcacattatagcattctccatattgagtcaggtagcaggctgaatgaagattggattctcattgcctttggtttgtcatttgaagtaatctcacccagcagcccagaaatggaatgatcttgctctttccttgtgtacattatattctgatctgttctttttttttcttgctatttgtttgcacaggaagttctcaacgaatctcagactaaacaggaagtgatttttttcttatacaaaggggtactggtaggaacgaagatgggcaggagaaggagagggaataggtggcctgcggcctggcggttcgttgtttccttcagtggattttatgtaaaatccctaaatactttaggtttatgggctgtgcacatttctgagtaaatctgcttttctaaattggtttcatcaactggaaaatgtaactggattgctggagatacacctgggtctaatttaccttgatcctatttggttacttttcttttttagtagatattttaacaaaaggccaaaatttcaagtgtatttctttggctttaggaaatttatcatttgtttagagtaattttttctccatttaaggttcaaaataaaaagattgaatacttttgaggcagagtatctcagtattaatcatgttaatgagcataggctttggagacaaaccttcctggatttgaatccaagcagtcacttagtagttgtgtcatttaggcatgtgagagattttttccttggtaagattgagtgtcatcaggtttaaaagaaataatatttggcaggctgggcaacatagtgagaccctcatctctacagaaaatttaaaaattagcctgggtacatgcctgtggtcccagctttgggatgctgaggtaggaagatcacttgagcccaggaggtccaggctgcagtgagctgtggttgtgccactgtactccagcctgagcaacacagggagaccctgtctgaaaattataataataataataatatttggaacttagtctgtgcatagtaagttctcaagtggttgctgttgctgctgctactgctgctgctagtacttcttgaagaaggtgactagggaaaaatagacaaaaaaaatactttatttgtcttgtttgattagtcgactttaccttttcctaatgtggatgcaactgagaattaaccccaagctaatgtatcaaaggacattctcatttgggtctatcagccctagcagaatgcctgctctcttttctagaaagaggaaataatctgttttccatttcattttttttaaagattttagctatctttgagtatgtaacatctattatccttgtagggtgtttggaaaacttcctgtttactccagtgcatccctggtagaggatgtagataatcatcgtattgttattttattacataaacatggactgcttcttataaacatctttgttctaataatgtggtctcatactcaaggtgtgactttctggcatcctgtgtggtattcagaggccagaagatagaaaattaaaagtagtgagatgagccaagcgaatctttttaatccttcttgaaatcttttttttttttttttttgagtcttactctgtcatccaggctggaatacagtggcgcaatctcggctcacctcaatctccacctcctgggttcaagcaattctcctgcctcagcctcccaagtagctgggattacaggcgcccaccactacgcctggctaatttttgtgtttttagtagagacacggtttcaccatgttggccaagctggtctcaaactcctgacctgaggtgatccacccgcctcggcctcccaaagtgctgggaatacaggcatgagtcaccgtatccagccacttcttgacattctttctagcagtttttataccactgcttcccttctggaagccttactgatgtttaagttacatgttgatactcactttgtttttgtgcttccctttctctttcctggacagaaaccaaagcccaaaccccggccatccatcacaaaggcaacctgggagagtaactattttggggtgcccttaacaactgtcgtgactccagagaagccgatccccatttttattgaaagatgtattgagtacattgaagccacaggtaagagtattacctcatagcagtttataactttcactgtctacaggatgcttactggagggtcaagccatctggagattctggaatcagttgttgttgattgtgagatgctcttggagaaggagctgagcagtcccaacagttgtcagatgtgtagattctccatttgtgtgcagttttgaggctgtcgttgggcatttattaggccttggcctacgaaggagctgttctgtgctcaaggtggcagctatggctgcttgggcgctttctctgtgctacctcacccaccagagcatcagcactctgtcagttgcctgcccgcctgtgttccctgcagatctgtgaactccttgagggttgtgctatcattgtgtcctcagtactatagtggatacataatacattttggtttagtaaaattaatacagccctcagcattgttcggatgcctgagacccatgtattgataggatttttttctgaggtaagaaaatgattaggatgtttgggatatcttctggttatgccgctcctctgacaacttgatgctatcacaaaggtagactgtcttgggaaatttttttgcattgttcttgaaataattaagttttacttgtgttgaaaccatttgctttattcatttgagctctcatgtgtccctttggccttccagtttcactaaggtgggttcttgagcattcggagttgggctcaggaacacaggcttaaactaatttgaaactaaggtagggattacagccttccaatctgttctttctaactctgatattatctacagtggtattaagtattgtgtggtgtggacagcctactaggctctgctgataatttcagcagcatcgtgtgaagctgagtgacagtgttcatatttacttaggatgttgtaaagcagggaagatggctttatttattattttatttttatttttatttttattttttgaaatagagtctcactctgttgcccaggctggagtgcagtgacacgatctcaactcactgcaacctccgcctcccaggttcaagcgattctcctgcttcagcctctgagtagctgggattacaggcgcccgccatgacgcccaactaatttttgtatttttagtagagacgggtttttgccatgttggccaggctgttcttgaactcctgacctcaggtgatctgcccgcctcggcctcccaaagtgctgggattacaggcatgagttacggtgcccagccgaagatagcattttttttttttttgagatggagtctctctctgttgccaagctggagtgcagtggcatgatcttggctcactgcaacctctgcctcccaggttcaagtgattctcctgcctcagcctcctgagtagctgggattacaggtgcacaccaccatgcccggctaatttttgtatttttaatagagatagggtttcaccacattggtcaggctgtctcaaactcctgacctcgtgatccgcccacctcagcctgccaaagtgctgggattacaggcatgagccactgcgcctggcctgaagatagtttttaagttggagcccaccaaagactttgtatttatttcctaggttttctgtggaaaccagagaaataattccccccaggcttgaatctcagtaataagcacttggcataatcattacagatctatagctttgtttagtccattctgtacccaaagcggtttctcattgtccatcttttttttttcctgctgtagacacaggggtctcacttattgcccaggctagtctcacaatcctagcttcaaatgatcctcctaccttggcctcctaaagtcctgggattacaggcgtgagctaccatgcctggcttcagtgtccatctttttgacactcgttttatattaatttcctcctttatctgtctctataaaatgtttgaaagttgcaggtgtgatatgcacctttacatttatttatttatttatttatttatttatttatttatttattatttaatttttttagatggagtctaactctgtcacccaggctggagtgcagtggcacgatctagactcactgcaacctctgcctcctgggttcaagcaatcctcccacctcaggctcctgagtagctaggattaccggcatgcaccaccacacctggctaattttttttgtatttttagtagagatggagtttcaccatgttggccaggctcgtctcaaactcctgacctcaagcaatccacccgccttggcctcccaaagtgctgggattacaggcgtgagccaccatgcccggcctgcacctttacttttaaatacttcagtgggtatttcccaaaaacattctcttatagaaccactgtgcatttatcaaaattaggaaatcaacattgatctagtactaatctgtctgtaatctaatctatagacattctcatttcatcagttttcccactaccttcctttatagcaacagacaaaacactgttttggtccaggaccttatcctggaccacacgttacatttagtggtcaaatctggcccagcacagtggctcacgactgtagtcccagcactttgggaggccgaggcaagcagatcatgaggtcaagagatcgagaccatcctggccaacatggtgaaaccccgtctctactaaaaatacaaaaaattaggccggggcggtggctcacgcttgtagttccagtactttgagaggctgaggcggaagatcaggaattcgataccagcctgaccaacatggagaaacccagtctctactaaaaatataaaattagccaggcttggtggtgcatgcctgtaatcctagctagtcgggaggctgaagcaggagaatcgcttgaacctgggaggcggaggttgcggtgagccaagatcgcaccattgcactccagcctggccaacaagagcaaaactgtgtctcaaaaaaaaaaaaaaaaaaattagctgggcatggtggcacgcacctgtagtcccagctactcgggaagctgaggcaggagaatcgtttgaacccagaaggcagtggttggaatgagccgagatcacgccactgcactccagcctggcgacagagctagactccatctcaaaaaccaaaaaaccaaaaaaataaaatcaccaatcagttattttgtagggtgttcctcagcttagctttgttttcccttttttttttttttttaattttttgtatttttggtagagatggggtttctgtgtttcccaggctggtctcaaactcctgagctcaagctatccacaagcctcgacctcccaaagtgctggcattacaggcgtgagccactgtgcccggccttggctttgttttagttttttggatatttcatcgtgatcaagttctgggtttgcacttctggcagataccacagggcagcaatgcctttgctctgtcccctccacttcatctctgctgcccaccatcacccaccttctcagtccagtctatgggtatgacagtttatctgctgaaaacccatccttgcttctttgttgcctaccagatgcaggtcgcactcataatcctccttcccggactcaggaacagcaagactgttactatgccattgtcccctgccctccttcccaccctccttttttttccctctcccactcccttctttcacccctttctttctgttttatgctgcttcaagtattaattttaaaattgttctacaagaatgcgatttatcagaaggatgtgaaccaagcagaatttcttagtatttctttgccttagggcattccccttgtgtggtttaaaatttgtcccccattcctttttgcctgtggaacttatccttattcttcaagagactcctactcctaatagcactttgaatttaacctccctggtagttcttctcagccaaatttcaccttcctgaaaacaggattctctgttctccttgtctccctagagcccgatacagcatatacattaattgattattgtaaattagccaggcatggtggcacgcatctgtggtcccagctaccctggaggccgaggtgggagaattgcttgaggccaaaggttcaaggctgcaagtgagctgtgatcataccactgcactccagcctgggcaacagagcgagaccctgtctcttaaaaaacaaaagagagagagaaagagacagggtctcgctctgttgcccagtctggagtgcagtggtgcagtcatagctcacttgcagcctcacctttctggcctcaagcctcttgagtaactgggactacaggcatgtgccaccatgtctggctaatttttgtattttttgtggagacaaagtctcactatgttgcccaggcaggtctcaaacacctggccttaagccatcctcccaccttggcctcccaaagtgctgggattataagcatgtgccactggacccagccagagaccctgtctctttaaaaaaaaaaaaaaaaaaaaaaaagatagattgaatgagtggttttcaatctggaacaccttaattccattttcgtctttcttcaagaaaaaaatgaccatatatttccccttgttggcattagtttgtacttttatggaatttcagaagaaaaattaaacctggtatctgtgagcttagtgtgcattggagggatgtctttgtgtacccttatttcctaagaaaactttttctcccttttataaaattaaagcaagttcattgtagaaattggacaaatggcaagaactgtgaagaggaactcaaagattcgtgatctgctacttagtgaaaaccaccgttaatgatttgagatgtttcttgtagtcttatttctctgcatatacacatatatttattttcacataattcagagtatgaggtaagctagctttcaacatttttttaacatagccctcttagatgaggcagaagaggccgggtgcagtggctcacacctgtaatcccagcactttgggaggccgaggtgggtgatcacttgatgtcaggagttccagaccagcctgaccaacatggcaaaaccccatccatctctactaaaaatacaaaaattagctgggcttggtggtacatgcctgtaatcccagctattcgggaggctgaggtgggagaattacttgaacccacgaggcggaggttgcagtgagccgagatcgcaccactgcactccagcctgggcgacaaagtaagactctgtctccaaataaataaataaataaagcatgcatgcatgccaggcatagtggtgtgcacctgtgatcccagctatttgggaggctgaagcaggaggattgtttgagcccaggagttccaaggctgcactgagctctgatcgcaccactgcaatccagcctgggcaacagagcaagaccctgtctcagaaaaaaaaaaaaaaaaaaaaggaaaagaaaaaattaccattaattcagtagtatcatttcacatacagttcattttaaaatttattcatttgacgtaaaactatatgttatagctgagctttttgtactaggattcaatcaatagtcacactgcacttggctttgcctctttaggcccttgccgtccagaacagtcctctctggcttgttttaataatgtgattttttttttttttttaaagagacagagtctcactctgtcactgaggctggagtacaatggtgcagtcgtagctcacggcagcctctaactcctaggctcaagtgatccttcctccttttcttcctgagtgctacaggcatgctccaccacactcagccaatgatgaccttttttgaaaagcctagtcagttgtcttgcagaatgtcctcttcatgtaatgtgctctttggacctcttcagcatcctcagctgccttccaggaccaagtgtggcctctgactgagcagggggttgagcaccctgcaggtggtggacgcgggactgctgcctccctttctggacagggcacacgtatgaattgggcttacgggctccatagggttgtattgaataattgaacgaattgtgagctagtgttttccccaactttgactgacagatagtgggcttgcactttgcttagggaaagctggtgctgccacctgccctctcaccccatctctctctcttgctcatggttggaatggccatatgaccacacagtttccatgtagtattccaggcagggagtcctagctgattagagatgacattcccaatgaaacttgtttgccaggcctggtcaaagcagtccaaagtcagaagtctttgtgtccctgtttttgtgtccatttcatgtaccttggcactttaaggcttgtcctgcaaaataaaacattgcatcatcacttgtgaaggcagagcttgggagtttgcactgctaagatgaggataggaaagaaatttatgccgcagggcctttgatgctgcccactcacctgtctgcacagccagggcacggccagcgggagtggagaagatgagcgagaccaaaaccttgccgtggggaggagggtggcatagccattgataaatcgggacttgaactatcccatcactctaaaaatattttttatctgattacaaaagtaatagatggccaggcatgatggctcatgcctgtaatcccagcactttgagacagcaaggcaggagtagcattcaagcccattagtttaagaccaaccctggcaacatggtaaaatcctgtctctaccaaaaatacaaaaattagccatacatgatggtccatgcctgtagtcccagctactcagaggctgaggtaggaggatcgcttgagcccagaaggttgaggttacagtaagctgagatcatgccactgcactccagcatgggcgacagagtaagaccctgtctcaaaaaaaaaaaaaaaaaagtaatatacttgctcactgtaaaacaaattaatcattatagatatgtaggacagaaagtaaaaattctttataatcccagtctccaggagtcatctcattaatgtacagattatgcttcctgctaatgctagtcccccaaaacattgaagtctgagtatgagatcatctctgtgctgttccgcagctcattgtctgttttagcagaacatgatatcttgggcgtcacttctgaattccacctccaggccaattggattttggtttttgatgtgaggagaggatgcaagagctggtatgagaggagggtctctggaagtgtgggaagagaagccttgtttgcagaggtggcacgtggcagtttcctgtgactggcatctcccagccccttagtttgtgagtaaagtgccaaatccttctaaacacagatcacaagaaaaaagatcatcactttcttacctcaatttactgctcctgatgtttacaagcagggcgctgtgttgagactcctccccgatattttcccttctcaggttagctcctacattgtgagggaaattggttctgatttgcacctgtcttctttcctgagctttctgaccagttcatttacccttgttcatacttctgaaaatcagaatgtggtcaagaaatgaccagagagtagaacagctttcagattgatctgcagatgcttttaggacagcccagccccggacaccctctgtgcttgctgtgctaataggatattcgactttcactctctcagctccggttacatggaaaggctggatgagggcatgtcactgccacagctgctctgggaccgccactgagagtgggaaggaggcggggttgagggggagcttaggaggcggggttgagggggagcttaagagtcagactaactttctatttctagcttgaatgctttttttcctccagttttcatctttgtggaaaattggttgaggcaatggagtcactgctcccttctgcagcagtgtggctcctaatgacagagaacattggccaagctcatctgagctctctgatgcacagcaggaagtagaattattcaattcagtgtacctctctggaatggggcaagaggttacttttagagctggctcacaatcctcctgagaataatttctcagggtaaagtacactcttgatagctcatggtggtcacaagactgaggttttaaatcctgggtctcagggccaaatttgagtcaagccttcctaggattcaagaaatctgacagcataggaaccccctgaggcagcttccaagtgtcgtcacacctgcccacccgggacggtctcagcgttctggagacagaatcctagtgccccacttgccttggctctgctgtgtgtgttcccgggtccccagcctctcctcagcctcacttgctatttaactagaaatagcattctctacgcatgctttctttgaataatatgtgaggccagacttcgttccctgtttctgtgatttttaacctctgcttttggcagtgtgagaggaggcatggcaacagtgaggaaatgatttccctggccccagtcctttcttaattggtttgcttactgagatgaccaaccctccacatctctagccagtgctgtagaggccgagaagaggaattgtgcctagggagaaacagttttactggggcagaaggcacccatcttctctcttgagttatgatgtattcaaactattctatataaataactgccaggacacagttttgttagtgcagctgactttcagttagtccctctggaatgaaaagctgtctgaagtcaaggaaggcctggcaggtgttccctcaccccgctttctgttccatacatgtttcttgagcgttgatatggcctaggcctggctctgggcactccgtcatatatgatcccataagagatggtgttttgctctaagaacatgggtgtggtaggaagctagcccttgggaggggtcagggtacatctcagtcctctgtcactgtggggaggacctcagtgtcagtaaagttcagggttagtctggctggaaaaaaggtggcagcattgatattcccttccctgtatataaaaccttgagaggagtcctgcataaaatccggtggcagaacccaggctctgcctctcagggcagcacctacctgtcatagtaatttagctgaagttcacatttattttctttttcttattttttactttttttcagaaatggggttaccctgtcacccaggctgcagtgcagtggtgcaatcacagctcactgcagccttgaactcctgggttcaagcgatcctcccgcctcagcctcccaagtagctgggactacagaagtatgccaccatgcctggcttggtttttttgttttgttttgttttgtttttgtttttgttttgtgtgtgtgtgtgtgtgtgtttgagatggggtcttgctgtgttgcccaggctggtctctaactcctgacctcaagcgatcctcccttctcagcctccctagtctctgggattgcaggcatgagctcctaagcccagcttcacatttattttcaaaagctctttgctggagggtctgcagagccccaccttggggtatcattgcctgcacttaggagactgtaatgtaaatggtgccttctttatttgccttccaggggcacttccttgatggacacataatcaggtcaactttgacctcttgtccctggttgagtggggaaatcccagagagaggatcacgtggttgtaggaagacaaacttccagataactctttaatagctttaagcttaattcacttaccatcttttttgtgggggtggatggcagatcttgttcattaaatgagtatttattgactttatattaattaagcacctactatatgctaggcactgttttgaactcagatagcccccatgtgtctgggcgtgggggagatagatataatcacatgaatgcataattcttcagacaaggaatgttattggattttaaaattattggggaataaaataacacacaggacccagtgttggtgaggatatggagcaattagaatcctcacattgccgaagggagtgtaaaagggcagagtcactttggaaaactctttggcagtttattaaaaagttaaatagatccttttatagttcataagtgtgatgatggggtgtacagggaaaaactccaaccccatttttcctctagcctcacaccaccacaacaatcaccaacacagaagacttatgtgaccaaatgtgtggggtgctttccccacacaccaggcaccagacaccagctgggtgtcctccggttcaattccaaaaccgtctacctagagatagtgtcagatcctgcaggttgggggctcagcacccaagactgccctccacatccccagacaccagttgcaagtgcaggcctctggaacttctgactgaccggcttcaagctggggttcccatgaccccctctttgggttcagttaatttctggagcagttcacagaacttagggaaacacttgcttatatttactggtttattataaagaatattacatgggatacagatgaagagatgtgggtagggcgaggtacaggggaaggtcgtgcagcttccatgccctccctgggcaccaggaacctccagtgttcagttatctggaagctctctgaaccctgtcctcttgggttttatggaagttttatgacatcagcattccttcccccagggtatagggtgggaccctcgcaggggagggtcttaagactcacagttggaaggtgggggaagattagagtcctgccttgtggcaggtgaaaggaggacaggagagagattgtgtttcccgatacctgcccttggggcctaacacacccaacattataacaaaaaactataacaagggctgtgggagttaggaaacaagaactgtagacaaaaacctatgtatcatatcacattgggttttcatgctcatgtgtgagaagtgcctctttcaaaccttgttctgacacattatcttacatgcaaggaaaaaaagctaaacatacacttaccatcccacttctaggtatttgcccaagaaaaatgaaaacatacgttcacactaagacttgtactcagctgtttctagcagctttgttcatgacagccccaaactaggagccacccagatgtccaccaccaggtgaatagaccagtaggtccatccatctgatggaatacttctcattcattaaagggaataagtacgctgtgtgtaacaacagtgggatctcaaaattatgcttctgagagtgatggaagccagacacacaagaccatgaaccgcggttccctttctagaaagttctggaaaatgcacactaacctactaatgtgaagccaaccagtggtagcctggaagctgggatggcaagaagaatcgattgcaaagagacaatagaaaacttttgtgggtggtggaagtattccatattttaattgtgatcatttcactcatgtattacatatttcaaaattatcgggccaggcgcggtggctcacgcctgtaatcccaaaactttgggaggccgaggcaggtggatcacaaggtcaggagatcaagaccatcctggctaacacagtgaaaccccgtccttactaaaaatacaaaaaattagccaggagtggtggcgggcgcttgtagtcccagctactcgggaggctgaggtagaagaatggcgtgaacccgggaggcggagcttgtagccagccaagatcgtgccactgcactccagcctgggcaacagagcaagactgcgtctcaaaaaaaaaaaaaaaattatcagatggtatactttaaatggatacagtttactgtatataaattatacctcaataaagttgatttttaaaaacaaaacaaaaaagaagtcattggggaacagttttgaagaaacttgctgtttatataatttcaaaatatcatctagcgcattaactactagttacaaagggggaccacacctttataatttaaagatctgggtattaccaccttaccaaagtagttacactcagcatctctactggatgaacccgacattgtgttgtgcctcctggccaaaaatatttcacctgaattttatcagggagaagcaatcagacaaacccagaatatgatacatttataaaacaagtggcctgaactcaacaaaaaaggggtctcatgtgacttctccatttgtaccgtgaactcgttttccactagcctagtcagatgtgaaacccatgaaacttggagtcacagctgacaccccacctttgccaggcaggagtagctggccaaccataggcaagacacctaaactttctaagcctcatttttctgttccttcaaattgggaattaaaataacaactctttcaaagggagtttttgacaattaaatcctgtttgtaatgttcttggagtagtgcctggcacatagtgatcattcggtcaatgttagccattattttggtagctcctgtcactgacctgctgtggtgtggaaatcccaatgggacgtttccccaaaacagtaatggatgagactgggcagtgtctgtaggcagtttttaaaacttctccttgaaatataacacacactaagaaaagcacacccatctgggcactggttgcataggtcaggaaaacagaagacggccacccccaaaggcccctcgtcatttcatccctcaacaaaggataaccagtatcctggcatccaatggtatggaatacttttgcctgcttttgtattttaaaaatggaatcataccaaatgcacatttttgtacctggcttctttcacttaacattatgagattcagctacatgattaaatccgtaaattcatccatggttgtgtatgattgtaaatggttcgttctcattgctatgtagactttcatcatgtgaatattccacaatttctttctttcttccactcttcctggacatttgggtactttccagtttggggcagttatgaatagtgctgctgtgaacattcctgtacatgaattttggtgtacatatgtgtgcacttacattggtgtgtatacctagaagggaggcagttttgaataattcagtttagcatgttggacacaatgatttaaatgatgtctccaagcacgtatcagtccctgaaggggtaataatctctgaggctgatggcagaggcagtcaggggatctctctgtgttactgagcttgtggtggtgtgtttttgtatcttcggggctgaaggagtgattctggcagggtgagtgtgggttccccaaagctatcaccacattcttgccccagctggatcgttgccatctactgaggcctggctggccctccattacctcgctgtggctctctctgtggttttgcattgagtctgtggtttgcacacatcttgatgaccccatggtttttacctgccgggccatcataggacagtgctctctgatgaaatgctggccatttgtggcacagagaagtaggtgtcaacaagaacacctagcagtgagacaagtcttcaccaagactccaaaatgaaaggttcagccttgtgggcagtttgtgaggagaggaaagagagcaagtcaagaaatgaggctcttaccccagtccctttacagggcgaatgtggagcccggcagctgtggaccagtttgtctccatcatttgcaggtcagaggttaccctcagctcctcagctgcaaatggaagccctctatcaaacggcctttgccagaatacttaggctgtgaccttccccctatgcagctcatttgcctgggtaaatgagtagagtgctttctgcgtggcagatttaaatttcaccactaattgatgctagcgtcttcaggggaaaatgcttgccattagatcacaggcctttgggagacagcctcataacaaatacatccaggacagggggcggggatggggaaagtacagaatgcagctgtaccgaaaggaactgtgggacgtgcccagagaaaccaactgagtacttttgaggcatgcccttggggactgcgcatgtgcatggttgtgccatgtgtgttttgatggcctttttttttcttgctagtgtatagtatgtacaggacaaacttggagccaaactgtctggaatcaaatcccagctctgctgcttacaagcaaatatttaacttctccattgttagtttccttgaccataaaatggggataatgatggtactttgagtcatgagatgattcagtatgttagagacctcataacagtacctggcaggttgtaagtagtcaatttgctactgttgttggtgttattattgaaatgatctaagatgcatcttccactctaggcaggcccctgtgctggccatccccttcatttgccaagtcccccatgcagaggctcctggtcttcaagacccagtatgggtgtctccccagggagagtagcccacgtgacttgttctcccttctgcattcctcatgtcatagcagggcgggtcagagcatggactttggaattggtacaattggtttaaaatcccaactgaagggggatgggggattaagagaggatgcttaaatggatataaaaatgcagttagaaggaataagttctagtgtttgatagcccagtaggatgactatagttaacagtaatttattgtatatttcaaaataactgcaagatgtgaaatgttgccaacacaaagaaacgatatatatttgaggtgatggatatcctaatcatcctgatttgatcattacacattgtatccttgtatcaaaatatcacatgtatcctgtaaataggtataattatgtatccatttttaaaatacattatttttagaatagaatattaaaactatgaatactcaaagttctgaatgagtgtgtcatttattacattaattgtgctgttcaatttaaatttatgatcctccaaataaattgtcaaaatgatttgaaagcaggaactattatttatcttatgaaaagtaagccccataactaaaaaagttcctgcaaaataatctgtaattgtgtttatattacatgaatgattcgctgtttctccaaaagagcatttaagaagtcagtaattctcaaatgtgcaaagtatttccacgtgcttaacaagaaaactatctaaaacgaaacaaacaaaaatcccagctctgccacttggctaaactctttcacattgctgagcctctgttcttcctctgcaaaatgcagctaataataatgcccaccttattaggactatgaggattgtttttgttttgttgtgttgtgttttgttttgtttgagacagggtctccctctgttgcccaggttggagtgcagtggtgcgatctcagctcgcagcgtgcagcctcgacctcctgggtctcaggtgatcctcctaattcagcctccagagtagctgggaccacaggtgtgtgccaccacgcccagcagtttttgtattttttgtagagatggggattcgccgtgttgcccaggctggtcttgaactcatggccttgagtgatctgcccaccttgagtgatcccagagtgctgggattacaggcatgagccaccatgcctggccctacatcactctttaagtggtcctttgtgcatttatttctctgcctggctccagagagctggaggactgtgaagacactccttttttcgcatattcagcaagtatatattgagcatcttatactatgtgccatgcactgtttaagatgctggtgatacagcattggaccagacagacaaaatcctcaccctcgtgtggcatacattataacccggggggagacagataataagaagtaaaatgtaaagaaccttagtgattagtgtttgggaaggaaaaaaatgaagcaggaaaggtggggtatgaaatgtccggggtgaacattaacattttagataaggagggctggggaagagtggcttttgagaaggtcctgaaggaaatgggggagagaaccatgccatttcctggggaagaacctttcagacagagagaacagcaagtgcaaacgtccagaggccaggacattcctgggaaagagcttggtttttactctgagtgaggtaagaagccattgaggggtttggagtggagggacaggacttggcctttgcttaataaaataactggctgctctgtagagaacagtcctcgcccttgaggacttgtgtgttcttgttctagctgcctttctgcaaatctttctccattctgctattcctttctctggatgtatacccagtcccccatattgccggcatgggttcaaccaaacccctccttcatacttgaaagggtagagtagcacactccagtgtgggggcagcccaggttggagcccagctggaagaattcagcacagtaagcagacgggtcacttcccgtccaaccctgtctttccaagcccatcttccttcacactggactccttagcaccttcacacggtgtcgtgcctctgcgtcgttgttaaacactgttcctgctgcctaatatgttgtttcctctcccatctaacacattcccatcctttccgaagccttcacactctagacatgcctcgattatagtagctgtccccttgtgttagggatactgtttctgtctgtcactccttagaagaagagacaggagggagcttgctctcctccctctgccatgtgaggacacgagaaggcagctgtctgtatgtaagccagcaggagggccctgccagaaaccaaataggctggcccctcgatcttggacttcccagccctcagaaccatgagaaaaagagagctattgttgaagccacccagtctgtggtattttgttatggcaacccaagcagctaagacagatggcaaggtgaccaactcaggcatcagaacacctgagagccttaaggcaggggccccttctttcctgattcatgtgtccccatgggacctggctctccagagtcctccatcagggatctttgtgtccacatgaccagaacacagcaattgggtcagcagaaatgggaattgaggcaactgaaagtcagaagggctgagacaggtggacgaagacgtggacaaatgccacttgagagccgtggtctgaagagatgagctcacgcctttgtgtagtgcccggctcccaggtggtttactgtttgaaatgtaagctgactgggtatcagacaactgaatcccactttttcaaacaaagatggtgcaaggccttgtgatttcaccccagtttgcgttctttcactcttggctggcatcctttggctatttaaattcgtagcctcccaacagtttttaaaaaacaaacaaactcacacaatttatcttttcatgtaagctgcaatttggttgaaacaagacctttctagtacatagtccaaagctcctgataactgaaactacaatcagtgtttctgttctgtgatctgttttttgttttaaaagccacaacagaaaaccttttcttctgttacggctgtcaggagccgtttgggcttaatcaataatgaggtgtttcacttcctggggctgggctatctgtggagagcacttacttctccgtaacccatgaagccagtgaaggaccctgaatctgggtaaattcaaaattcttctgagccttggatagtcttaggcatagttctggcagggtctgacttgaaaaagtaggttgtgtatttattattgtcgtttcaatatcactaacacgaggtgaagaagaagaagaaggcaaaagacccagcctgagcagaactcaatgtaacagtccttgattctaagccgcccccgtccatgtgatacaactcctagcgggggagggatagtggggcattatattaagtataggtattaatgataagttcgtctagtttggaaaacttttaaatgggcagagatgaacataatcagatggcaaggatgtggtagtagctgtttgaataacaataatgatgaggatagctaacattgataagcattatttcatgtcaccctctccgtgacagacagagcctgagaggagtcgccattgcccccacacagccagcctttcagcagccttcttggcagcagctatgtcagaccaacagtaccttcctaattttagcctcacaaaattcatttatgtttcatatataccttattcacatagcatgaaggtaatttcatacgatgttttttgttttgttttgtgacagggtttctttccatcacccgggctggagtgcagtatttcatacttcctgtatttgtggcaggaagctttatgctttatcatcagagtgatctttgaagggaaggacttactcagcatttaaataacacaagctagattacagagcaaccctttaaaccatttaagaaaaaaatgatttcctttttaaaaaatggtaattgctgtatgattgtcaaatttttcctcttgaaagtattttttaagtaaaaatgagcctgcatactacacccatgtatgaccatcatataacaagacagggtaaatgcaggtcacgcatccctaatctgaaatccaaaatgccccaaatctgaacatttttcagcaccaacatgattccccacctgaccccatgtggtcacagtcaaaactttgtttcatgcacgaggccagggcacagtggctcatgcctgtaatctcaacacttagagagaccagtgcgggcagatcacttgagcccaggagtttgagaccagcatgggcaagatggagaaacgccatctctactaaaaatacaaaaattagccacgtgtggtggcgtgcacctgtagtcccagctacttgggaggctaaggtgagagaatcacttgagcctgggaggcagaggccacagtaagctgagattgcaccattgcactgcaacctgggtgatagagcaagaccctgtctcaaaaaaaaaatttatgaaattaccttctatgctgtgtgtataaggtatatgtgaaacataataaattttgtgtttaggtttgggtcccatccccaagatatctttttttttttttttttggagagggagtctcactctgtcacccaggctggagtgcaatggcacggtctcagctcattgcaacctccgcctcccatgttcaagcaattctcctgcctcggcctcccaaagtgctgggattacaggcgtgagcaaccacacccaaccgcatcctcaagatacctcattacttatatgcaaatattccaaattctgaaacacttctggtcccaactattttggttgagggctgctcagactgtaatacatcagtgtgattaagagcagccacatggagtcagtctctttggatgccaggcctagctctgctacccagtagctgtgtgatctggggcaagtgacttaccctgtctaagcctcagtttcctcatctgttaaacaggcatgatgatgataagcagtattttatgtatgcatatatcttcctacgtttaaccagtggtttctaaacatttgaggcatatgtatagctctcatcttactaattacaaattatcattagctgttcttaaagcagactttttttttttttttttttttgagacggagtctcgctctgtcgcccagggtggagcacagtggtgccatctctcggctcactgcaacctccgcctcccgggttcacaccattctcctgtctcagcctcctgagtagctgggactacaggcacacaccaccacgcccaactaattttttgtatttttaatagagacggggtttcaccatgttagccagaatggtctcaaactcctgacctcgtgatccacccgcctcggcctcccaaagtgctgggattacaggcgtgagccactgcgcccggccaaagcagactttctaacactgctattcaaatggtaccatccttcatcatttttaaaaagtgtgatttaaactgttaagtagggctgggcacagtgaccatcccagtgcttctggaggccgaggcaggaggatcactagagcccaggagtttgagaccagcctgagcaatatagggaaaccctgcctgtacaaaaaataaaaaatttgccaggcatggtagtatgtgcctgcagtcccagctacttgggaggctaaggtaggaagatcacttgagcctgggagctcaaggcttcagtgagctgcgatcacgctactgcattccagaccggcaatagagttaaaccctatctcaaaaataaataaataactaaactgttaaatgtgtggcttagatgatttattcctctaaataggatgaataaatttgtgagattgggcacagtaactattttggtacagtggcaaggtgattggtgctggcatcagaacacacctgactgttagttcaggatctgtgcttctcgcattcgtgcaatgaggatgtttaatgagcctctccagcaggccagaagataatgcatagggcatggtctctgctattaggagttaggaaatgagaatgggggaataggtatagaaggagggagatttcttatgttcaaaatactgtgagaacactgaggagggagctggagtgcagtggtgcgatcatagctcactgcagcctgaaacacctgggtttaagcgatcctcctgcctcagcctcttgagtagctgggactacaggcccaagccatcatgcctggccaccatcttaatcatttttaagtgcatggtttaaggccaggcacggtggcccaagcctgtaatcccagcactttgggaggccgaggcgggcggatcacgaggtcaggagatcgagaccatcctggcttacacggtgaaaccccgtctctactaaaaatacaaaacaattagccgggcatggtggcgggcgcctgtagtcccagctactccggaggctgaggcaggagaatggcgtcaacccaggaggcggagcttggcagtgagccgagatcgcaccactgcactccagcctgggcgacagagcaagactccgtctcaaaaaaaaaaaaaaaaagtgtatggtttagtgtgtgccagatcctttttaaattatttctctttgaagattccttcctagtctaacaaatttgtagaaaactactatgggaggagggcctagcttagcaggagttttccttaaatattttatgtgtggatgacactgcgaggctttttcctcagacatctggaactggccatcggagagctgctccaggcagttgctctctgttgctctacctcgttgattgaccgcttcctgcacattggacctgtatgtatgatcctgcacaccagatgggatctgaggaaggctcagtcaggagtccctgaaccagttcccactgtttgaaacaatggttttgcaccctggtagtgaagcatttgcttttgagaactgcaattgcatgccttctctgacatctgtaacaacaggcattctctttcatcactttcccacgccctcatttgacctttacagcatttggccgtttttactcatatattggggattgaggtcacagatgtctccagttttgtcaaataggtgatatttctgtttctcattctcctggttgcttttgtgtgattctccagaggaaaaagggtaaaatctttattctgctgtttttaaacgaagtacagttaagtaaaataaatttagcattctggaaaatctccttttttaaaaaaaaatttatttatttatttgagacaaggttttacttcactgcccagactagagtgcagtggcacaatctcacagctcactgcaaccttgacttcctgggctcgggtgattctcccaggtaggggctacaggcatgcaccaccacacctggctacttttttgtattttttgtaggatggggttttgccatgttgccaggctggtctcaaactcctgtgctcaagtgattcggcctcccaaagtgctgggattacaggtgtgagccaccacacctagccaaaaatctcctttttttatttatttttattttattttattatttttatttttatttttttgagacaagagtttcactcttgtcacccaggctggagtgcaatgacaggatctctgctcacttgcaaccttggcctcctgggttcaagcaattctcctccttcagcctcccaagtagctgggattacaggcacccgctactacgcccagctgatttttgtatttttagtaaagacagggtttcaccatgttggccaggctggtctcaaactcctgacctcgggtgatccacccgcctcagcctcccaaagtgctgggattacaggcgtgagccactgcacccacccaaaaacctccttttttaaatggtctttatattttgtctactgatgatgacttcctcactaccattgttttagaaactgctccttttgtgccatttaaaggtaactcgaagccaggtgcgagtgtggtggctccagcctgtaatcccagcatgctgggaggcagaggggctagaggatcgcttgagcctaggagttcgagaccagcctgggcaacatagcaagaccttgcctctacaaaaaaaattttttttttttttttagttagccatgcattgtggcacatgtctatagtcccagctactcaggaggctaaggtgggaggattgcttgatcccaggaattcaaggttagagtgagctatgattgcaccactgtactccagcctgggcaacagagcaagacctgtctcacaaaaaaaaaaaaaaaaagaaagaaagaaaaaagtaacccgatcttgttgaggaatgtgtgcttatgcccttttccgccttctctccattagccctggctgtttctgtctgcctgtaattttattagcatttcagtcagatctgtcattaggtacccatcttcttgggtatacgtatcactctgctaagaaacaaaaggaatacatgtctcctccatgactaggcagtgggtgccacaggagccaatgtagaccaatatagtcattcaggcaggaagcttatgtatgagacggtaggtgatagacccctagattcctgtggcttcctcaggtcttttgtatatgaagaatttcataggttttcattctttggtctacatgcagagaagagagtttcttattagagaacagattggagaaaaaaatagggcttttactgtttattccacgtatttctgtattgtgtgaaaagtaatttagcaatgaacacgtattttgttaaaaaaaattgtagaatcgttagaagtaaaaagtaaagtcattttctcattctcaaagttacctgctattaagagtttaaattgtaccttccagagctttctgtatatgtgtctacacataatagatataatgtgctgggctgctttttatacagatggagccatgctgaatgtgctgttctatgctttgctttttcccacctaaaaatgtattgcatacattttcctataatgatgggcataaatcagcctttgaaaaacttgactggagagtatttctttggcttttttttttttttttcagagacgaagtctcactcctgtcccctaggctggagtgcagtggcgcaatctcggctcactgcaacctccacctcccgagttcaagcgattctcctgccccagcctcctgagtagctgggattaccggcgcctgccaccacgcccagctaatttttgtatttttagtagagatggggtttcaccatgttggccaggctggtctcgaactcctgacctcaggtgatccgcccgcctcagcctcccaaagtgctgggattacaggcatgagctgccgcgcccagccaactgtataataatttgtttaatcagtctcctgttaaaagacatcatctcagtcttttgttaatatagataatactgcattggctatctatacatgtgtagacacatgtatacacacacatacatgtgcatgcaaatacatctataggatagatacctcagaatggaataggcagatggaaggataggtacattttatattttaaacaatattgccaaaatgctctccagtatagcacctccatcagctgtatattagggtagtggtaaaatggtaatatgttagaattgcagctgccttacagtcatccagtccacctctccacaacatgggtgaatctcatggacgcgttgaataaaagaagccagaaataaaagaatgtatactgtatattttatttctataaagtagaaaaccagaaaacctacccatgctattagaaatcaggatagtggccaggtgcggtggctcatgcctgtaatcccagaactttaggaggccgaggcaggtggatcacctgaggtcaggagttcaagaccagcctggctaatatggtgaaaccccatctctactaaaaatacaaaaattagccgggcgtggtggcgcacacctgtagtcccaactactcgggaggctgaggcaggagaattgcttgaatcggggaggcagaagttgcagtgagccgagattgcgccactgccctccagcctgtgtgacagagtgagatcctgcctcaaaaaagagagagagaaagaaagaaaaagagagaaagagaaagagagaaaggaaggaaggaagggaagggaaggaaaggattgggatagtggatatccttggggagggagtagaggctggtagagggcacaaaaggcttctggaatgctgggatgttttgtgtcttgatctgtgggtgctgtttacacaagtgtggtcattgtgtgaaaatccatcaccgtacacttctctgtaaacttctgaatgtgtattatctttcaataagagtttgttttttaaaaaagcctctagtcccaactcttccattttaaagataagaacccaggagttgaagagattccccactgtcttgccatatgagcagctcagggtttctgagagcctgtgcaagaagccagagccctggcctgccttgccaagactggctagtgatgttgttggcacttggaaaggccgtgaatgtgtgacaatgtctctcaccttgaggcccctgaagaataatggagagtctcagagccagctcatgtgtcaaatggaatttctggttttatagcttatgctcttgtgtttagggcagaaattctagcacaaggcctcacacccaggcagtagacaagggtggggaagtttctgatggagaaaagttcggttctctgttactctggccaacctctcattcttttgtttttgtttttgaaatggagtctcgctttgtcgcccaggctggagtgcagtggtgcgatcttggctcattgcaacctccacctcccaggttccagtgattctcctgcctcctgcctcagcctcccacgtagatgggattacaggcatgcaccaccacacccagctaatttttgtatttttagtagagatgaggttttaccatgttggccaggctggtctcgaactcctgacctcaggtgatccgcccgcacttggccaaagtgctgggatcgcaggcatgagccactgcgcccggcctcaacctctcattcttagtcctttttctcactgcatcctcatccttcccgttttgctgctgcttcctactccttttcaggctagcctatttcagaaaattttatcttttttagtaaaattatttgctcagaataaaaataaagcagatttctgtttcattcttcctgggcctgctttgggagggtggtgagtggtgaactccaaggaattgtttgcatggtgtgctaccctgatgggagattctcagcgtccaggattcctttacttttctgtgggggttctatctggaaaccttatgtgactcagggcatagtatgattttgagcacttcctgtggtcaaaaactgttgtctttgattggaaattatgctgtgttctgagtgcttgctggcacgcacacactgttgactgcttgttctggtagcacatctgcgtggggtgccttaaaagtgggcactctctcagcagaaaattcccatgtgggacctcagttcaagcccctcctcactttcatcactttcttctcttttgcttcccttcctctgtgccttcactcctccacactggcctcagcaaatcccatctattttccaagccccatctgaaagcgtgcctcttctctgatgaccatccttgttggagctgactttgccgtccctcctgtggacatccatgccagttgtctgtgtcatctgtttagcagtcatctggtcctaacttttagcttatcttttattatatctaagtgtgatctaacttttcacctttatcttgtctccctgtcacctcgaaagaggacacgacagtgctgttaatttttctatctcccatgggacttaatcggtgtcctccacgtagtatgctttaataatggtttattgctgtgatactgcttcacaaatgccagcagatgccatgctgtatcatcagagatgagattattttatttatttatttttaatttttttattttttgagatggaatcttgctctgtcacccaggctggagtgcagtggcgcaatctcggctcactgcaatgtccgcctcccaggttcaagcaattctcctgcctcagcctcccgagtagctgggattacaggtgagtgctactacccccagctaatttttatatttttagtagagacggggtttcaccatgttggccaagctggtcttgaactcctgacctcaggtgatccacccgcctcagcctcctgaagtgctgggattacaggcatgagccaccggactcattattatatgagtcattattatatgcccagacaagattattataaatttaaatttaaatttgtaatttattttgtgaacctgagcaggtgacttttttttttcttttcttttctttttgagacaggatcttgctctatcacccaggctggagcgctgcagtggcgtgatcatggctcactgcagccttgactgcttgggctcaagtgatcctcccgagtagctgggaccacaggcatgcaccaccaagcttggcaactttttaaaatatgtttcgtagagatggggtctcaccatgttgcccaagctggtcttgaactcctgagctcaagtgatcctcccacatcagcctcctaaagtggtgggattacaggtgtgagccagcatgcgcagccagtggcatcattctttaagtctacttttactccataagccaatctcccattgaaaaactgacaaaaataattctcaactttcaactggtttcagctgaccctctgaatgtgggataatatttgcttgatagggcagtttcagttcagcagaagggctggtgtggctcattggagcttatggaagggggttctaccagggtaataaggtcaatatgtgaatcctttgataaaaaagaaatgggcacaagccaacatggacccagagagagaataaaagtcttaaaaacttgcagaaatgaacagtcctggtaggtctttggtagcctgtccaaatacagagcatggatctaaagtgatttctttcccttcatatgtttattcagttatcatagtactaccttttgatagccttcccctatattttgtgacaattactttatcaaatattcagttcttaaaattgagtctttttaggccaggcgcggtggctcacgcctgtaatcccagcgctttgggaggccgaggcgggcggatcacctgaggtcaggagtttgagaccagcctggccaacatggtgaaaccccgtctctactaaaaatacaaaaattagccgggcgtggtgacaggtgcctgtaatcccagctactcaggaggctgaagcaggagaatcgctggaacccaggaggcagaggttgcagtgagccgagattgcgccattgcactccagcctggaggacaagagcgagacttcatctcaaaaaaaaagagtcttttctaagatttcttttgttttactgattttactttcttgtttttataccaaaatcatgtttcctaaatttttactctcaaaagtgctttaatagctggtaaaattcaactttttctctgggtctttttcttgggttttttgtttgtttgtttgtttgtttgtttgtttgttttgagacagggtctcactttgtcacctaggctggtgtgccgtggcacagtcatggctcattgcagcctcgatctcccaggctcaagtaatcctcccacctcagcctcccaagtagctggaacttcaggtgcacaccaccatgctcagctaattcttgtattttttgtagagatggggtttcgccatgttgcccaggctgatctccaactcctgcgctcaagtgactctcctgcctcagcctcccaaagtgctgggattacaggcgtgaactgctgcactcggcctggattaatctttttcaactccatgtttcattcccataattgctgtctttgccagaatattctttagcctcacaatgtttagtttttacaatcctaaaagaataattgaacacctgttatgtgtcagttccattagatgctggaggctaaaatatgaataagatagttcatattgccccctagaaggactcttagtcttctctggtcaaaaccaagtcaataaaggaagtattagttggaaaccctcagtctccccagcctcaatacctagcttcacttgtacatccagcagcccctggggtctactttgcaaccttccagtttgccatatgtgatattttctattggatcttttaaagatatttttggtatttttttctttctttgcaaaatatttatacgatttttggtattattttatttagtgcattttaaccattccattgagatttttattttatttatatacaaaatgcaattgaggccaggcgcagtggctcatgcctgtaatcccaacactttgggaagctgaagcaggaggattgcttgaacccaggaattcaagaccagccccagcaacatatcgagactctgtctctacaaaaaattagaaaattaatcaggtgtgctggtgcatacctgtagtcctggctgattgggagactgaggcaggagaatcacttgagcgtgggaggttgaagccatggtgagccatggttgcaccactgtactccagcctgagtaacaaagcaagaccctgtcccccacccccaaaaaatgcaattgaacatctttgtaatgtatggtccttcatttcaaagtcatgacacctctctgctttttttcctcttctcttttttcttgtgtagtcattacagttgtttgtcttactttctagggttgatgggatggagtgagtgtaataagttagtctataataatatttctggcctatcaagtacaaggcatttttgaagccaagaagatcctgaggaagcctgaggccagcccccattggagatgactacacacatcaaagagaaaattaatatctctccacagtcagtttgcccagtgcccatgaggctgcaggggttagtgctgcagaagtcagggagcttgcttgcttggagtctgggatggaggcttgtccttaaagatacactggattctctaacaggatgggaggaatagtctaggtgtggaaagtcaactgaatgagagtcaggtgtagaggtgagaggccgtgctgaccacgtagccatattgccctaaaatcctttgaacgtcagcctccagcaattggacttggcctgggcttttcagattttttttttttttctcagatccctagaattgtaagggagtccttctgcatggggacgggaaaggtcaggccaccaggactctggatccttcagccttaaggttcagtttaagatttcatttggaagaaggattttctcactcctgagaaagcttgtcagccctcaccgttaccatttgcgggaaggtagggtttgaaggttttcatcccagagaatctgctgacctgagtcaacagcatgtcctccatggggagggggtctctcccttgttaccttcccacaccagtcaacctcatcagtcagtcccattgtttttaccacctaagcgtgttttcagcctggcccctgcccctgcgtttagtctctcaccctcttcttggtttactgtggtagcctctttgtaattgaccttcctgtttctggtctcatgtcctttcagtcccttatgcacactgctgcaaatatctttccaaaataaatgggatcacttcatcttcacctgcttaaaactcatcagtggttctgtatcactctaggatgaagtttcatcctactacttaccagcaggatgtggtccctgcccactgtctagctctgcctcttgccatttccttcattcactctaaacttcagcccacagattaaaactacgcacagttccttaagctgccattatatttctcacccgcactgcctttccttgctgttccacttcgagactccctcccagagtccttctctgatctgctctgtgagccagggctccctgccgtgtctgtcacgcccggagtccttctctgacctgctctgtgagccagggctccctgccatgtctgtcacgccctgtgctttcccagtgaacacgtagcacactgtactctgattgtcttccttcctcaatggatcctaagttccttgagggaagggaccgggtcatcttcattgtctcctccaagccaagcatacagggctctagtaaatgatgatgaatgactgaatggcacagaaacactccagagacctctcccctcaaaagcttcattcagtggtggaaacgtggaattgtatacatagaaagggaggaggaagaagattcatataacactaaggtcttgagcaaggtggcagtatctgggcaggagcaaatgcccagtgtttagtgtaggggcacagcatgtgtgttgctgatagggcatgcgtgtgaaacatttaggtgggatatctaaataaatgggcttggacagaaggagctgtgggtcagcagagcaggagggaagaaagcaagggaatccaccggcaaggctaatgggaagcctgctgtccctcggctggaggccagccacaaagtgtcacacacatccttcctgagtttggggaaatatctgtaggtcacttcagaatttgggttcaaaataatatggaggccacattattcataatagccccaaaatggtaagaacccaaatatcccactgatgagtgaatggataacgagatataatatattcatacagtagaatattattcggccgtaaaaaggaacaaagtagtgacgtgctacagatggatgaaccttgaaaacattacgctaagtgaggtaaactagtcacacaagatcacatggcccatgatctcatttacacagaattatctagaataggctaatctataaagatagaaagtagattagtgggccgggtgcagtggctcacacctgtaatcccagcactttgggaggccaaggcaggcagatcatctcaggtcgggagttcaagaccatcctggccaacatgatgaaaccctgtctctactaaaaatacaaaaattagccgggcgtagtggtgtgtgcctgtaatcccagctattcaggagactgaggcggaagaatctcttgaacctggaaggcagaggttgcagtgagccaaggttgcaccactgcactccagcctgggccagagagcaggactgtctcaaaaaaaaaatagaaagaagtagatgagtggttgccaggggctgcgagaagggagaaatttggagtggctgctcatggatacagttttttgggtgttgatgacagtgctctaaaattgtggtgatacttgtgcaactctgaatgtgctcacagccatcgaattggacactctcacagtgggtgaattgtatgttgtgtgaattatatctcaataaaacggttgtgaaataataatcataataaacggaggataggtggatagatgttttactccaggtttgctacttaaaatttttcactgagtctgcagtggcctgtgttctttttgaggtgggtccttggagaagagacctgctctgacaaagcttcctcactgcctggtggtttctcctgtctggcacatacactctgtcggactgcttgaggcactgctccactctcaggagcaaccagggatgggagacagcactagtgtcttcggtgaacgtctgcatccagcccgcgtgagctgcgacacacagacccttagagagcacttgcctcctgcagaggtctaggggcagagggttggaccagtcctgccctcaataaccactcagcgacttgttttctgtggggtgtcatcagctcagagaagcaacacgtctttcctaggttctctgaaggagatctactcatgccattgttggatctgtctgctacaagtgttactgggctggattcgaggactttgtttttccatctgccctctgtattttcctaggaatgcttctgtgaatacccccctcccacctgccaaggcaagtgaggcagcagcaccaggagagctggacccctgcacacaccaccactgccaccacgctgcctttgctccgctgcctggcttctctgtttcccctactgaactgtgaggaattggggcaaagactgcctcttctttccattacctgtgacccatagtaggcactcgggtatctattgaaggaattagtgaatttttctttccacggattgaattagattgggacaaagaaagaaagtcatggggtgcagggtgaattcttggggcttgatcacttcaagatctcatcttggcttaagtctgtcaacatttttctttttccttacccagccctaagctatttccattggcaatatattgcacacaagctgtgtttcacttcttaatgctatgggatattgctgctacaagagccatccttggtgtttgcagaaatatttgtgatttgaggaacccagtgcagtgtagagcaggtaatgtgggggagagcaaactcacacccctgcagtctctaacttgaaggactgtgcaagcaggcatgttccttacgtaggggtgcttaacctaaggtctgtggataggctatggaagtctgaactcctcaacattactgcggaaattttgtgtgtgtgcacacacacccaggtgtacacttgccctgtggatggtgcagagtctatacccttcatcaggagatcagagtgaggggcgtctcctcccctgaaaaagttagagatcactgttcattcacagcgtttgtggaaactataccactgatcgagagcaagccaggacgatgatgcagccttgttctcaagggatttataatctagtaagggtgaagatttcaccctaaaccatgtagagcctacaaaaggaggtcagggaggccagggagggctgggaggtagagttgttgggacttaaaggatgactcgaagtggaatgattgagcctagatcaaatcattttctcttcacagctctccgtgacaggagactgcatagcttccctgtgagtccatgggccccaaagtgattataactgacctctagcttgactgtgcccatcccctgccattggatcctctccaaaacagacagtcattgtcacgtatactcacacgacacacagggaaaatagcaaccaacaaactgtttccatgtgttagagtggtagaacctggctccatttccagtgtctcacctccatgtgtatgaactaaaaataggcaaacttggctgggcgcggtgactgacgcctataatgccagcactttgggaggccgaggcaggcagatcacgaggtcaggagttcaagaccagcctggccaatatggtgaaaccccatctctactaaaaatacaaaaattagccgggcgtggtggcgtgcgtctgtagtcccagctactcgggaggtggaggcaggagaatcgcttgaacccgggaggcagaggttgcagtgaactgagctcacgccgctgtactccagcccgggcgacagagccagactccatctcacacacacacaaaaaaaatagacaaacttctggggggtatcagggtgtaatgactcccttggttttttgggttttttttgttttgtttctcttttttggggtttttttttttgagacggagtcttgctctgtcacccaggctggagtgcaatggtgtgatctcggctcactgcaacttccccctcccaggttcaaacgattctcctgcctcagcctcctgagcagctgggattacaggcgcacgccaccacacctggctaatttttgtatttttagtagagacggggtttcaccaagttggtcaggctggtctcaaactcctgaccttgtgatctgcctgccttggcctcccaaagtgctgggattacaggtgtgagccaccgcacctggccggctccctcagttttatccttccctacagagaggtggcctcacatacatccatctcacttatgtttttatgtgattgcagaaataactcccaatgttaagaacactgatgagtggtgcacagttcttcagaaaatatcagcccagtttttcctagaactgctgtccaaaaaaacccaccaagcttgtaaatggaaatggctaataagtgttgtttgtttgtttgttttttgagatggagtctcgctctgtcacccaggctggagtgcagtggcacaatctcagctcactgcaacctccgcctcccgggttcaagcgatcccccacctcagcctcctgagtagctgggcctacaggcgtgcatcagcacgccaggctactttttgtatttttgtagtagagatgaggtttcgccatgttggccaggctggtctcaaaatcctgacctcaggtgatcacccacctcagcctcccaaagtgctgggattacaggcgtgagccaccgctcccggccagctaagtgtttagaataagtaatatgcatatattttcagctttataactaactgagaacaaattgcagtgttgtcctgatgggacacagcaggacaaaaggccaactatttcttgagctgatttcctacagctgctggtgaactaactcccagattgcttaatctaactgggaagtgctctttctttagacttaggcgtgcggcgcacagcctttcgtgagaggtacgaaagcagtgtctgcgggcagcatgacagatgtggccctgagcgagttccttcactcctgagtctccctgtccttgattgaaaaatgaagacaaaagtagcttccttgcaaagtacttgcacatattaaaagagataatatgtaccaagtgccaggctggagctcacattgccaggccctgtgctaagtgtttccatgagtctcatttaagcctcatagcaaccatattagatagctgtgatttccaattttctcttaagaaaaatgggattcagaaggatgaagacagaatctgggattcaaacccagagccattgcctgctagccacactgccttcctttactggagtgaattgaagcccacagaagacagatcaggtggagtcctggctactcacagagcaatggaaacaggcagatagtattcaaccctgttcccctgcactgaagatttacttccaaacctctcttaactacctgaggattttttttcttcctgacaaatctgtacattttcttttcttttttaaaaaaattgagacaggtcggctgcagtggctcacgcctgtaatcccaacacttcgggaggccgaggcaggcagatcacctgaggtcaggaattcaagaccagcctggccaacatggtgaaactctgtctcttctaaaaatacaaaaattagctgggcgtggtggtgggcacctgtaattccagctactcaggaggctgaggcaggagaatctgcttgaacctgggaggcggaggttgcagtgagtcgagatcgtgccgctgcactccagcctggatgacagagcgagactccgtctcaaaaataaatacataaataaattaaaatgaaaaattggccgggcgcagtggctcacgcctgtaatccctgtaatcccagcactttgggaggccaaggcgggtggatccgagatcaggagatcgagactatcctggctaacacagtgaaaccccctctctactaaaaataccaaaaacttagccgggtgtggtggcggggcgcctgtagtcccagctactcgggaggctgaggcaggagaatggcgtgaacccaggaggcagagcttgcagtgagcagagatcgcaccactgcaatccagcctgggcaacagagcgagactccatctcaaaaaaaaaattgagggccaggcacaatggcttatgtctgtaatcccagcactttgggaggccgatgcaggtggatcacaaggtcaggagttcgagaccagcctggccaatatggtgaaaccccatctctactaaaccccatctctactaaaaatacaaaaattagccgagcatgatagcggacacctgtattcccagctactcaggaggcaggataatcttttgaacccaggaggcggaggctgcagtgagccaagattgcgccactgcactccagcctgggtgacagagcgagactccatctcaaaaaaaaaaattgagacagaatctcgctctgttgcccaggctagagtgtaatagcacagttacagctcacctcacaacagcctcaacctccaggctcaagcaatcctcccacctcagcttcccaagtagctgggactacaggtgtgcatcaccacacctagctaagtgtatcttttctaacaccacttcttcagttttctgacaccactgggtgtctgtctagcaattcatttaattctgacactaactcccaaagttagcattagactccataagttcaagggctcagtcccacaagactgcccttcagatgccagttgcaagtactgggtgactaaccagaagtaagcttacccacacttctgtcctacttgccttcaaagtctggcgttaccatcccattcctccctgggttccataatttgctaagatgactcacagaattcaagaaaacgcttaacatacatttgctgatttattataaaggatataactcaggaacaaccaaatggaagagatgcaagggacaggatgtatgcaagggcggcgattcaccaggagcttctgtgccctctctggatacacactctcccagcacctcgatgtgtttaccaacccagaagctctacagaccctgtcactgagggtgtttatggcgtttctgtgatgtccgcttgattgattaactcattggccattggtgattgagctcaatctccagcccctctcccctcacccccagaggtcgtgggtggggctgacagttccaaccctctaataaaggtttggtctttctggagaccagcccccatatcctgcactatctaggggcccacaagagtaacctcattatcatgaaactcaggtttggttggaaggggcttgtttgttctgagacggagtctctcactgttgcctgggctgagtgcaatggcacgatctcggctcactgcaacctccgcctcccgggttcacacagttctcctgcctcagcctcctgagtagctaggattacaggcgcatgccaccacacccgggtaattttttgtatttttagtagagacagggtttcactatgttggccagactggtctcgaactcctgacctcgtgatcggcctgcctcggcctcccaaagtgctgagattacaggcatgagccaccatgcctggccagaaggggcttgttaatgagtaacaaaagatacttctatcactcaggaaattccaagactttggggaactctgtgctaggagccggggacaaaaaccaaatatatatttcttctactacactgccccatcccctcctgcaggggtcctaaatttaagaccttgctagtgggcttcctgcacccttctgagggtgcgcaggagaggaggctgccagcctctacatctggaaggagcaccagggagggcccagcctggggctgggagctcaggggccagtgtgccgcggcagcacagtgagaatcctgggcctgtgtggggcttgttcttcactttacaccccatacatggtttattagttaatctcccgtgagccagaggacagtattaatctcaaagtaatgctaatccctttttacaagaggaaacagaaatccccaagtcctctggcagaggccgttcacagcccatcagaatggaaaaggcctacgttccagcccttttcctgtcttctctgctttaggctgatgaagctgtgagttttatagcattggactgagcagattcagaattttaccaaataccttcccacttggaaaacagccaccctgcaaaaaacctccgtgtttccctccacattcatcatagccaccagttcctagagctatcatgaaggagagttggcgggacgagagctgttaaattcagttagttactatttccctgcagtcagcctagatctatgtaattctgtctttcagagaaggcagctaatttcagtatagatactcccatctatcactgtaacagtttaataggtacggttatagcttgaatacaccaacaggctttatgtgagtaattgccgtatttgcactgctttgaattgataaagtgctaaaatatgaggtatactgtttcatatgctgtgatttttatgggggctgtctgttacttaatctctctccctccccctgtaattctagttttactaacaaattgctttcccacagtccaaatagttttaaaacaaagctttctccttttttttttttttttttttgctaccattcctcaccaccctcccgtttttctgcttgcttataagttaagcacaagtcacttgcattccagaaattccccattgccataaaggcaggcagtcagctcgccagctcttgcctgttccagataagcagggttcatttagcttgtgactcggcattgctagcggatttcctcaggccccagtgccctgatcagaacagtgtgccctggcacaccgcctggagagcccagcagccaaggagaagtagagcttgtttcacaaagtaaccctggccttccatccaagacagaaatagtctgggtggcggcccaaggccccgagacggttccagccggctgctttgcctggctgtcccggctgcactcgccttctccatggtggggagctcgggcagacaggttgctctggcctgagcgtgccaaccaggcccatggcctgtcctgccatatttgccaaggcagtacaaacaggacggtacagcaggctgtcctgtgagagtggtcccaaggagcagtacccactctcggctgcaggaccttctcgggcccttggtggagctggcctgactgtgccattgaattatcacctgggggctccggtggcccttgctcttgctctgtgtctgtctgttcatctcactcacacgcacaccttctgtgctgccttgctcatgaggtttcacacccagcaaatccccatgcctctataacccctgtcagtttccttgacctctgcttttttcctgttcatttcaccaaagccagtgaagcacagatgaactaacctcttctcctccgtgttacactcactgtaaaaacatctaagacccgcataaggtcagtctgggaaggctgagccctgataaaaggcgacagagcagcccattagcaagaatgtggccagcttctgcagggggcgtggccctgtggggactcccagccacagccaaaccatggctctgccctgtaaaagttaacagccaggtctggagaccagacttaacagcagcacatgactggctgtggcgaaataatgaacccactacgttcctagtgaagttaccgggaagaaggggagggagaaggcttcttggtgaatgtagaacctcaatacatctggaaaggaaagtaggagttggatgctccagccgcttagggagcagctcctccatgctggccccagtaaggcacaggccccttgagaacaaacacttgagtcgccttcctccctctcttcagctggagaaacgctgcacttttcttcctccttccctcctttctgaagacagctactgaatgccttccctggtactagttactgtgcaagcccaatacacagacgggtgatgagaggactctgcctgctcctgtgaactcaggggtctaccaggggaccagcattaagcagctaatcacacagctatccagcgactttcacatggtgcccagggctgtccaggaagagcatggagacagtgccttgtggtgattgattaaacacagactctggaatcggactgcccgggtgtgaatcccagccctgccatctgtttgccacgtggctcagtttgttcagttataaaatgggaagaagaatggtagaatacaactcacagagctggtgtgaggactgggtgagacagtgcatgtaaaaggcttatggctggccttggcccagagtgccggcactgcgtaaatgtaagcaattgttgggatcctataacaggaacttaatttagtctaggagtcaggggagacctcggagggagcattgtttagtcacagaacagaggtaaaagtggaaggaacaactgtagggaggccctgcaagttcatcaggactgcagtgaagtataaggggagggtggcaggcttgagcctggtgacaggagcccccgaggccacatgttgagaagtttgtgttgtaccctagatttttatcctagattgcagggactgggatcagccttcctgcctgaggcttacaggcttctgactctgaaaagtattctttcttagggaagagaggccaggaaaggaagggacactgggctgtgattggtgacatgtttgcctcctttcatgggtcattgggaatcaggaacctgaaggaagttaacctctgccctccttaatgcttgggaggaatctgcttgtaaccccaaggggcttttctacttgggcctgccgtggaaaggaagcgggtgttttgtgtgtgtgtgtagtggggtctgtgtgtggggggtaggatatgtgtgtgtgtggtggtggcgtgtgtgatgggatgtgtgtgtgtggtgggatgtgtgtgtgtggtgaggtgtgtgtgtggtgggatgtgtgtgtggtggggcgtgtggggggggtgtggtgtggtgtgtgtggtagggctgtgtgtgcggtggggtatgtgtgtgtggtgggtgtgtgtggtggggtttgtgtggtgggatgtgtgtgtggtggggcatgtgtgtggtgggatgtgtgtgtggtggagtctgtgtggtgtgtgtgtgtggtggggcatgtgtgtggtggaatgtgtctggtgtgtgtggtgggatgtgtgtgtgtggtagggggtttgtgtggtgggggatttgtgtggtggggtgtgtgtatggtggggtttggtgggattgtgtgtgtggtgtgggggtgtgtgtggtggggtgtgtgtgtggtggggtttgtgtggtgggctgtgtgtgtgtggtggggtttggtggaaagtgtgtgtgtggtggggcttgtgtggtgggacgtgtgtgtgtgtgtggtggggcaggtgtgggggggtgtggtgtgtggtgggatgtgtgtgtgtggtggggtgtgtgtggtgggatgtgtgtgtgtttgtaggggggtgtgtatgtggtggatgtagtacacctgtattgtgctcgcggtctgtttctttgttggtggatctttagcctgtaagatccctcacagtggtggcaccagctctcctcggagtcacactgccatcactccagtgccactgggcctgcgtgggcatgccagcaaagtcacacttcagagcatgaagacgtctcacgttcttggcaggacggctctcccagctgctcctggctttgaatgttcactcccgttttgcagagcgcagtcggctcacctcgattatggaccacactcttcctccagaatgggcagggtgtcagctctaggctggcctcaagttctttgccagcgtggtttcttaagcccagctgttgggatatgcattttcttgaaagtcagggaaaagaatggagccccctgttgggctcagagcaggtccagaagtcctacttgacggttcatggcagcaaatgcataggcagcttctgaaggatcagccagatgctagagccatctgatcccccagacctggtgcgatgttgcacctcctccctcctcctcagccctgagatttatgacatggccgtgtgcgcatcgctggcatcgggaatgtataaagccacagtgcctgcttgtggcactcacacccagtcaagtcatcgtaatagagtgttagtggccttctatcatggggggaaagtctggcacaggaagaagcaggtcttgactgacaggggaattacctgggaagacagctaacgaaggggcaggggagggacagaggacccgagtgttcaaggaggagagcagccagaaaaccacccaggcacctcccgagcaggaaggcagcagggggagctgcggggactcgtgtgatttcaatagtagcgcttctgcggagagacacagcgaggaaaccttctctatggagaggaggccgtcgttcttctcaggccagacatccttgccctccagttcatagaagagaaaattgagggccgggcgcggtgtctcatgcctgtaatcccagcactttgggaggcaaaggtgggcggaccacctgaggtcaggagttcaagaccagcctggccaacatggtgaaacctcgtctctactaaaaacacaaaaattagccaagcgtgatggtgggttcctataatcccagctactcgggaggctgaagcaggagaatcgctggaacccgggaagcggaggttgcagtgagccgagattgcacattgcactctggcctgggcaacaagagtgaaactcttgtcatctcaaaaataataataatatttacagcatcttgacagactcattaatgatgtcattaccccattttggatgaggattccaagcccctgagaggagaggcgatttactctcagacacccagcctagctataagacagaaccaggatcagaaccaaggtcattttggtgtcaaagccatgcatgttttaaaatgtttttctacaaactgtcttgttttggccacgctctcagaataggtcatgcctacaggcaggtgccattgttgaggcttgttaagagtgtagagaaaaaagaatactggcaggcattgtgcagtggactgtgcatagacgatctcatttattccattgtacggtcagattagctgaggtcaggggcaggattcgaacccatgtctccctgacagcagaactcaggtgctcatccacttgccaaccagctttccacttagatcattaggataatagctactctctcagcactaagtgctaagatctcattaaatacataccaccaggggatgaggtgagaactgttatctctgttacacatagaaggaaatggagacatgattgctttgattttgacctaaatgctctcctgccccctcaccctttgatcttccattgaggtgagattgggggagtgccgcagtgtggtcctcagaagacacaccatagatacactgttagcattggatgaaaaagaagggcttcatacctttccacagaggtcggtcctcttcaagaccatttgaatttaatgctcaaagagtttccttctctccctgagtgctcagcacccctccggccttgcagtttagcctgccttagacttagtcttgcatgtgtaaaagaaaaagggaatggtttattagatgcttccagactccagaaaagtcgacaaaagttgttagttaagtcctgcctggcatggggtgttttagagtactagcagtgccaattaaatttttttaaaggactaagtgctgagtttctatatctaaatatagaaagtaaaaaataagcaagtctgagttcgtcttggaggaagtattgatgtgttgctagaaaggaaactttggaggaactgagtcctggtgtgaaggagcagaggcgaagcctgacgctggccgacagcactgctgctaagaagggcctgcctggggtccaggatcaaaacctgtttggatatttcagaaaatcaggataccaggaaaggaggtgattttccccattgatttccaagctcctgaggggcatctctccatttttttagtgtccgtcctgccacagacacctcccaggagcagggccagccaccacagctctgacagggcagtcgaagggctgaaataccagttcctagtccatggggaagtccccaccagctctcaccggagggccgtctagtcttcctatgtcaccaaagtattttttggtgttttgttttgttttgttttgttttgttttgttttgttttgttttgagatagggtctcactctgtctcccaagctgaagtgcagtgttatggacatggctcactgcagcctcaacctcccaggctcaaatgatccacccacctcagcctcccaagtagctgagactacaagcatgacaccatgcctggctaattttttatttcttgtagagatggagtcttgctgttttgcccaggttggtctcgaactgggctcaagcaatcctcccgccttggcctcccaaagtgctgggattataggcgggaaccatcacgcctgccctgccaaagtatttttgtggaagaccaagactgaaaactgtgtaaaggagccgggtgcggtggctcatgcctgtaatcccagcactttgggaggccaaggcgggcggatcacttgagttcaaaagtttgagaccagtctagccaacatggcaaaaccccatctctactaaaaatacaaaacttggccaggtgcagtggcaggcgcctgtaatcccagctactcgggaggctgagccatgagaatcgcttgaacccaggaggcggaggttgcagtgagccgagattgagccactgcactccagcctgggcaacagagtgagactttgtctcaaaaaaaaaaaaaaagattaagcaatgcctaagggcttgttttcgtataaaaagcagcagttttcatgctgtttggaagtgctttgttcctaaagtatgtggtatctattttgcctggtatattacccctgattttattgaatcatagaattcaagagttctgactaagacttctctggagccttagagctctggcacatcttctagaatggcagttctccaagtgtggttcgctggccagcagcagcagcatcatctgggaatgcattagaaatgcagattttgaggccaggcgcaatggcccacacccagaatcccagcattttgggaggcaatggcaagaggatcgctggagcccaggagtttgacaccaacctgggcaacaaagtgagacccccatctctacgaaaaaaaaatttaaaaattagccaggtgtggtggtgcacacctatagtccctcgcagctactcaggaggctgaggtgagaggatcgcttgagcctgggaggttgaggctacagtgagccaagatggtgctactgcactccagcctgagtgacaaagcaagaccttgtgtacaaaaaaaaaaaaaaaaaaaaaaaaaaaaaattcttgggctcccctccaaactgactgaatccaaaactctgtggctggagcccccgcacctgcaccgtaacaggccctccaggtgactctgctgcatgctcactcttgagaaatagtgattttgagcatcatagaagaagaactcaggtaggattcaaatcccatctgtgcgactcactcattctctacatgttcctttacctcctggtctcagcgttcctgtctgtagaatgggataataatcaccagtctggaggggttattgtgagaactgctatgaaaaggcacgaaagcacttagcaccgtgtgcctcatacagagtaagcatttgataaatggcttatcattattgttattagctagcttcctagaccaggtattcatctttttaaacagtaccccagtcagatggttgtctggtgagaggagattcaaaaattctggtctatttcaatgaataacagctatggctgttaatagttatatattgagagaatatttgccattctgtaatgtccattctttttttttttttttttttttttttgagacagagtctcgctttgtcacccaggctggagtgcagtggcacgatctcagctcaccgcaagctccgcctcccaggttcacgccattctcctgcctcagcctcccgagtagctgggactacaggcacccgccaccatgcctggctaattttttttgtatttttagtagagacggggtttcacaatgttaaccaggatggactcgatctcctgacctcgtgattcgcccgcctcggcctcccaaagtgcggggattacagacatgagccactgcacccagccttgtaattcccattcttgattgtagctctgtcccctagaaccattggaacaagacttttctacatggccttgttcagatatttgaacatagtgatcttggctgttctgagctttttcttgttctatttccaaagattaacttaaacatagaagataattgcagccagtagggagggcttttaaaaaagaaggagagaaacagaaaaggcctgcagccaaggctatgctttggtgacatgggtctttggagatttctggtaggtaaggatgcctgtgagtttaaggttgaggctttctcagatggacttgggagcctgcagtagacatggtgggtggaggtcactgttggtaagaattctgccttctgccactggcgggtgtgggccagagtcacccctagggtgtttccatgtaggaacagtggggtgttctagacacaaatgccttaatatccagcatctttgccagggggtctgctccaggaccccagcccttttcctgctgtggtctcaggcctttggcaagctgcccgtgctctttccagcgtcctgtttctcacctgggttgccagctccctgcagccttggtggtgtttgcagcctgctctcagtttttttaatctttttttaattgatgtctaattagtagttacgataaattgcactagccaagcaaatgctacctttcctaaattacgccgtggtattgtgtacgacagcagcagggttgctattttaaaatgggattgcgtaaaataaacatgtgcccagatgacaggaagtactaagttgatgattaattgatgctctggtacggcctcgtgctttccagtgcttccatttgtgtgacgatccatctagtgaagtttcagcaggtccacaccactgataattgccagatcgctaatttgcagttcgtctcctgccctctcatgccggggccggtggccattatgaggcaatgcagagcagtcctcagtcccgctgaaggtcagggtcaccagaaggtgatgtgcggccctcggctggccaggtcttctgcagctcggagactgcctctctacactgagactcaggaacggtgacattgctgcattattccggactcttgagactggtgctatttgtcctgtcattttctttgtattatgtagggctgatattcagggaaagggaaaataacttagatttagttttatttgtttttttcaaattaggagatgaagacttgagcctgctgacacatacccaaggcttgctcatatgtgaaataggtagaagtttaaatatgtcttgagagcagttgagaaaagagtcagtggaaaaattactaactagtgctggtgagcagggtctcgacagcacagggggtacgggtgtgccatctcaaaagctgccctggtgcttaggccagagggcttcacccaagtgtggtgctgcttctgagaaacgggggtgctgtggtctgtaccccagcctggtggattaataggaagcagcagaagcttgagccaggtgtcttctggaacactaaggaggcaggacagtggcagagtccccggactcagaccactctgcctcttagcagctatgatctggggcaaggacttcacctttctgaatcttagtttcctcatgtgtgtattctctacctacccaatagctcttcccatgaggtgtgggagattaaatggcatcatcgtttatttaataaacaagcaaatggtggatggggacaaagcacctagctcagtgcacagcgtgtgaccactctgatatggaaagtgccagcactctcccaggcgagtacagcagtggcagctcctttgtaactaggcgttgcttggtaggatgtccctggggttggtccattaacctccttttctctcggggaaagggccttggtgcaattaacagcttttaagccagagaattgatgcctcttgctccagtgttcttgaagcctcaagaagtctgggacccccagaaaacaggcaggccagttgcttttatcttgcctgatggctgtctctccagaggtagcagtgacaataacaaccaacacgtggctctcggaagcctgactgactccagggcccggtgctctctactgtcggcactgtttctgttgtccaggggcagcacccacagtgcttcctctgtgcaccttcagcaagacagagtcgctcaaagccagtcttcagaagggacccagggttgctttagccatgagaccccatgtcagttttcacagtgacttcactgtcctttcgacaaagtccttgagatcttgatggctcacagtggacttcgttcccaggacagggtgagtggactcagtagacagcttggaatccactctaagctgaacagtgctcctctgcccacggtaggatggggagggagtgggagcccatccttcccttgatattttattctaacttacgtatttaattgacttttactactttttttcttgtatcacactatacaccaaataagttccagaatgatcacagaatgaaatgatttttttaactgataaaaagaactagaaggaaaaaaaacaatagctgatacaggaataggaaaaacctattctaagcataaaaaccaaggaagacatcataaaggaaatggctggtcttgaaagcctaaaatttttgaattatatacttcaacaaattcagtaaacaaaattagaagacagataacaaaaaggaaaaatgtaaacatatataacgttgatataattacttaatattcatagactttctcaagttcaaaataagaacactaggaaaattaacaagaacatgaatacgatattcacaaagtaagaaatacctatttccagtaatctgttaagcttttactagttgtcaaaaaaacatacttgtgagttaattttatttatttatttatttattttcagacagagttttgctcttgttgcccaggctggagtgcagtggcacgatcttggctcaccacaacctccacctcctgggttcaagcaattcttctgcctcagcctcccgagtagctgggattataggcatgtgccaccacacccacctaattttgtacttttagtagagatggggtttctccatgttggtcaggctggtctcgaactcctgacctcaggctatccacccacctcgacctcccaaagtgctgggattacaagcatgagccaagtgctgggattacaggcgtgagccaccacaccctgcgcaagttaattttctaacagtaaaaacttggaaaaccctgtatcacttttttttttcttttttttcttttttttttttttttttgagagagtctcacctgtcacccaggctggagtgcagtgacgcaatctcagctcactgcaacctccgcttcctgggttcaagcaattctcctgcctcagcctcccaagtagcttagattacaggcgcgcaccaccacacccagctgattttgtatttttagtagagatggggtttcactatgttggccaggctggtctcgaactcctgacctcaagtgatcctcctgcctcagccttccaaagtgctgggattacaggcgtgagccaccgctcccagccaaccctgtatgattaacagcatgactattcttacagtgatcatatactttggtgtctttaaaatcatgtaaaagaataagaacttgaagtgattaaaataaattcacaacatactttgtaagtgaaagtaattgggttaaaatatatactacctctgttttttaaatgaaaatgaaaaactcaagagtatacatcaaaatatgaacagaagttatctttagctgctgtgcttctatagtctttccatttttaccaaaaaacaaatactttaaaatttttaagtgaaaaagaaaatggaggtcagatgggttgaagcatctagaaaaatcaaacgagagtgtgctgaggcctgctcctctcttgtggtgggcacctcatggactttccctggctttctccttgtcttcgagcccagccctcctcattctctgctctccagttcctgctcctaagaccctgcctgtttctcctcaggactgagcacggaaggcatctaccgggtcagcgggaacaagtctgagatggagagtctgcagagacagtttgatcaaggtaaagtgcagcctggccaggcatccgaggccagagctggtcaaggcagacacagctgcctcggtgaactgtctgtggggcttcggagcactcctgccagcacagacccaaagccacgaggtgctgagactgagaaagagaccatgtgtggctgcagcggggaggaggggaccgggtcctgtcagtgaaccgaagcaccatccctgcccaagctgggtcatgtaggccactccccacactgccactcacagatgctcttccaggttgcccgggcacatgcctccctcaccacactgaagagctttgcctgttttcccatgcagagctagttgcaggcacatgatatacaagtcgggttgagatgtgatcctgttttgccagggcctcagatctaccctcctcacaaagtcccagcaccagagaaagtgagggaccatcgtgtgaggagctgagcccttgggacagagacccaagttacatagctcttggcagggactcccttctcctaagctgagccagcttcaagaggcctaaagtcaggcagccaaactacctcttggaattgcccacactgtgggatgagaagccacgtcccccagtgccagaagcaaaagcaccagagcagggcacattcccatctatcagcagccagggcaggaggcaccacccagagtggacaccacacccacttcccaggtgggcggcccttgcgccttgcagcaccgcagtcgggctcagctggccggcagcaggcagaggggaccgcaggacagggaaacgcctgctaatctgtgggagacacgaggccaaagtgagggtagagcccccagtgtgggatgcatttgtatatatgggagatcctgtaccagcttacctcccccatagtggaacctggtactgtccatctgtagagatttcttcgtcatcaggaacgcactgaagtatgtatgcaatgagaaggaaagcatgacatgggtcagcggtgcctgtggctgggaagggccagagagagaaaaaatgagcctatttgccctcccaccataggggacaaggatggaggcagcagtcacagtggttgctaacatctttgtgacctacctggaaagcgagccaccctttaggaaagccgcctccttcttctgtgatgggaagggagtaaggaagaggcaacagcatatcaaagccagatgaaggcaagctcctggcaccaaaaaccagcatgtgggggtagcacccctgccccgagagtggtagaaggggcagttcagcagtctcggaaagaggtgctggggccagcccatgcctgaacctcagaactcgcgttagcgctcacaagtcccacccctccaatccttgccagtcctgaggccgtctctggctccttgaggtttctctagcctctcctgagccccgagttgtcctgatgcttctgcctggcttagaatggtttggcctcactctcctgacttcctttcagaccacaacctggacctggcagagaaagactttacggtgaataccgtggctggtgccatgaagagctttttctcagaactgcctgaccccctggtcccgtataacatgcagatcgacttggtggaagcacacagtgagtaccggcagcccagtgttgggcggattgagggagaaagggcttggcactggaagaataggtcctgccctcagaatggatgctggctgttagagctgaggtttgaaggacagagggcaagggaattaaccagatgacagcaatgggacttgcaaatcgggctcctgcccttgtagaccttaggtgcttatctgagggttacaccaagagagttgcaggtttcccccaaactctcattagttaagagcatggtttcggtgtcagacttggctccttcgcttgtggccgacttaaccttccctgccccttgtgtcctgccgttgttaccatccctactcctgcggatgaaattctattcggaaaggcctagaagtgaggctgtgaatagcctatttaatagtaggtcttatttttctttcccctcttcttacctgtcttctcctacctctcatgtaatgaagttaacatgggtctagggtcctacagcctcttaggaagccggcctctggagggaaagagatgactccagtggccctggccaagtaatcatttgatgctgtagcaaattagcacctctggttttaatggtatcctgtgtgccatgccaccttgcctcatcagttgttcctgccccagcctgcctctctgtagaggtgtttgtccagatgggcgagccttctcactggccagcctttccctggactttgtgtagtaccacagaggatgcctgacctctcagagcgtcccaccatgtggccctcactaccttttaagtcatcagcagccttcctgctttgtgcctctggcaggccaagacccagcagcagcccttgctgtgcagctgcagaagggagtgtctctgctagctgcccagagatcacagccacctgtgatccagcaaccagagggtggggaagaggaaaggagacgtgttcctcaggggcaagacattagtctcatcttgtcactgcccacctctaaagagggagctttaaacaagcacaatttattcacaagcctgatggtgtaggcagaaatttgagggaggtgatggatcagcatggccccgagtcctgggtcactgactcttagtagcatctgaaggagacaggtgtgcaagaagcccacccctgaactgtcagagcctcaatagtgacagggctgcggggcctccaagctcatccttccagggtctgcacttcctatggtgtctgttttcacaatctggatgccaccttcaccttattctgtccacactctcttagctgactggaattgttcacagctcctgaccctatctaagcccacagggatggggcaggagagcgtggtactcctgggagggtcatagagtagcctgctttctgaagacgggagtcagggtttctccaggggagttagtgggtggggacagttgcaggcttctcccctgatcctgctgtctgaagatagaggctttcccagcagtcacttctccagcaggctccaggcaggcacagatgtgaagtcgcatgggaaatctctattctggagccagctttctttccacggaagcttgtctcacagtggaagttaggaaaagaggaaggcgtagactgatacccagtttgctggaagccgggaattcctgtctgcatttgtcttgacttggcgccatctagaggtgcgtgaaatcctgccacccggcagaaccccattgtttctgcgggaactgctgacacagcacctttttgtgtagggttgtggggccggcaggaacgggaggtgctattgatagggaatcagccacccttcccacagcagctctcacccagcttccactgctcaggaggtggcttctggccgctgctactgcagcagcctgggaaagggtggaggtttcccacttcctcttcccattgtgtgtttcctgtccccgacggtactcagcgggggctccgttgtcttgaacctgaccgaagcgggtgggagaggagaagatcttgctgacatggcacctctcccggccatagcagttgactgaaaagctgggctgtggatgttgcagggccaggttcaactgagccgcagataccaggcagtgcaaaagttagtagtgttaagggatattatggaaaaaagatgattgtgccccaaagtagctcttcccagactggctggggtttccatggctacatcaacttgaccagttctttctacttaatccctgagagcaattgtgtctctatatgttcaggccttggaaccagtttcaaatcccatcacaacaaatatcaaggtcactagcaaatggttttgttagctccagaatttcacaatattgaacactgctgaaaatgtactcgcaaaatagagacgtttgtgattatttgccagttattttcctcccacactcaaggtgacacgtgggagattcagaaatgaacagcagcagcaaccgcaccgcccatggcctgtgtgcctgcctaggctgggcccggctctccacgaggcacttgattcccaccactgatcttcctttgaggaagatggtattataatacatctccattttacagagaaggaaacagcttctcagaggtgatacagcctgcccagggtcacaccgctagggagtggcaagccggggcttgagtccctgcgtacgtgggtgcaaatgaagttctctgaagacagagcaaagctgagcttgaagtgcacaaaccccagcaaggaaggcgcgaggaagagggcttcacaggggagatgggccagggtttcaggaggcagaagaaaaggcttgcgctgcctgttctgtctcctacctgtagcccacccccaccttcaagagtcgctcttgcctggtttctccccgtctctgtgactccctcctccctgcctatctggagtcgaccccgtccagctggtgtccacaggccctgtcctatggcttttgtgctggaaggggtgctagagctggctccgtctcaagccagagggtcaggaccaaaggacctgtggctccagggtccgcattaactccctgtaatagctcacaaaattcagtctttttaatttaaggagagaccagtcattttcatcacattgttgaaggggatgtgtgacccgaacatggttcaggatgccagctcattgtctcggcctttccatttgacagatgagactgttggggctagagataacagtgcagcctaggttaccaggggacggccctgctgctctctgggctcttgttcaccagctgccttgggacgttactggttctgggatcctgccttcctttgatctgtccacatagctgcccgagggcacgggggtgcttctcacacccacgtacggggtcattaatttcacagctagccaggccccgtgtggacagggacagatggcagtgggcacacacatatgtggtcccaggctcagtctggtgggacaggacattcaacaggtgattgcaaagccgtgtctccaggggaaggacagcttggattctccatcctgagccctgcagagtgaggtcttggccttggagttgtttaccacctggggcggggagagccgacgccggacgagcctgcgtgatcactgaagggctgtgaccttgagccgggctttccctttcctggcgatgcaggcgtgcagatggtcagcggcggccagcagggactttcctccaggcaccgagctggcagcagcagacccaggcctagagcttggttggcagcctggctgccagtgatggcaagtggcgcagcacagccagggcaggagtgttctttgggaacagggtctctgccgccactttgtttgaccttggaccggtattctggctttgtgaggcctggtgtgtctgttttgtaagaggtatgggaagctaatcggtaaggtccctgtgccctctgtctgtcccctcccctccctcctgagttcttggggtctctattgtactaaattgctggatctgtgtccaggctgtcttggttcaactggcccaaaaatgcctcccttggacgtttcttgttgtctcagtcgatggcccctaagttcaaaagtatgatgtcccaggaagaggtgcagctcccagcccacgccccctgagcaagagcagagccacctggagccaagccaagcaaaggggtgagcgcagtgtggaggctggggtctcctccataggccaccttctctcccggcccacgcccctggactcctgtctacccctgaccacacactggagcaggatgggttgtttgttgttgttgttgttgttagaaaaaactaagtgtcttgactcccaaagggcaggctgagggagcagaggatgtgaggatcgggccctccacagtctgggtcctgaggggactctgaagggggtggaggttacaccaaaagtctggacgagcggacctgggaatccacaaaccagcacacgccaggtgtggggagaagccaccctgggcacctgtaccatggcgggtccgggttgcagcagctcacccagggctgggtgccctgacggccctgtcccagtagggacaccagggagcccattgcccctgctgtttctttggccagtgtagacacctggccgggcgggctacctattgaagctgggggtccctgtacagcagggctccactgaagatggtgagtggctgccctgagtgtgccgctgccctgtgaccaggtccacacagactgtggccccagccttcggcagcaccatagggtagaaggtgtccagggtgcacgggctgggctggctcttggccaccagcttgttccccaggcctctggcttggagcctcgggagtctgtgcttgaccacacccaggcccaggttggagcgggatagcccagtcagcaccgtgctcagcaagtagcagccagccagaggcgccgtgaactcgccggggatgaggatggtggtcaggaggggaaacagaggcagggccaggaaggcctcgaggagccggcccagagctcctagactagagaggcacccactgggtcctttcccctctttccactagaccgtaagcggcagggaatttggtttttgtcccctactgcatccccagtgtgtaaaatagtacccaggcaggagcgggtccccgtaaatatctgctcctcccacccactgcggatgaacaaatgacccaaggaggaggggcctcccaaatccgagaatgaaagaattcgcattgtctgacaaggcaagaatggggcgctgtcaccacacaacctcacccatccccacgtgctcagcccagcccttctcatgctcacctgcctctgggtcagagtcacctcctccctcgctgaggactgttgagggacctgtgcctggttccaaccagggcagctgaaaatgccacacagggcacagacactgctggtgcctcccccagtcctgagtcaggggagggtgggtatagaaaaaaggctgggtacagtgtgactgggtacagtggctcatacctgtaatcccagcactttgggaggccaaggcgggcagatcatgaggtcaggagttcgagaccagcctgaccaacacggtgaaaccccgtctctactaaaaatacaaaaattagctgggcctgtaatcccagctactcaggaggctgaggcaggagaattgcttgaatctgggaggtggaggttgcagtgagccgagatcgtgccactgcactccagcctgggcaatacagtgagactccatctcacaaaaagaaaaaaagtgtcctagctggtgaagccagcaccctggaggccccccatcccctgtcctgtcagaggattactacagtcagagagggctctgccgcgtgcagggaggcggggacccagagcagatgggctaagctgggagacaggcctgggtcccatccacctttgccatcaccagccttgtggccttctcttggcctctggagtgggtttctcagccaccatatgggtaacgcccagccccaccttccactcgggtctgcggtcagggccatgcacagagcactgtgaagctgtcctgccagcacttgggcagcacccaaacctaagcagctactggtgcctttgccatgtgaagaggctgcagctggagcctagagtaggtccctccccagagaggccctagaggggtgagggcaagctttgcttaaggaaagaggtgaatggggctgagtcaaaggatgttcacaaggtcgaccttgcttttagtgtgggccagacttgagcagaagggcctctcgccctccttgacctctgcccagcgagctcctagtgctgctcagtactcaggagcacctggaccaggcagccagtggggaggggagcaggcgaggagactggccacccgctcctcactaggcgttcggctgaggtgcatatgcagaaggaggctgggattctagggggcagcccctaaatttattttttttctttttgagatggagtcttgctctgtcacccaggctggagcacagtggcacgatcttggctcactgcaacctccatctcccaagttcaagtgatccttctgcctcagcctcccaaatagctgggattataggcacacgccaccagacctggctaatttttgtatttttagtagagatggggtttggcatgttggccaggctggtctcaaacccctgacttcaagtgatccacccacctcagcctcccaagtgctgggattacaggcctgagccaccgcgcccggcccctaaattattatcaatgcaggctttgtaactcccacccctgcccctccccaccccctgaagaagaaacaaaaccacccgccttgctactcatcagataggaaggagagcaggcatctctggcagacctaggctttgccagccccgtttcctgcctccagccagaggacgggatgagacccagctcttatgtaaaggtgctaccactcgatgcctaattaagacaaacacagctgtgtttgggtcgtgcaggcacctacggagagacctgtgtcctcctgtgccaagctagcagctggaagggggcatgacgattttattaagtgaagctttacaccacacacatgctgcttgtgttttctaatacggtcttctgtcctccctacagcagtttactttgtttatgtaaacattttattgtaaaatgacaatgaattgtttgaagactcaaggtcgtagaaaagagtgtgcccatggccgggtgcggtggctcacgcctgtaatcccagcattttgggaggccgaggcgggtggatcacctgaggtcaggagttccagaccagcctggacaacgtgatgaaaccccgtctctagtaaaaatacaaaaattagcaggcgtggtggtgggcacctgtaatcccagctacttgggaggctgaggcaggagaatcgcttaaacctgggaggcagaggttgcagtgagctgagatcacgccactgcactccagcctgggcaacagagcgagactccatttcaaaaaaagaaaaaaagaaagtgcccttgaggtggaacccttaaaataaaccttggattcagagagatgaagctgctcatagcccaataactagctcccaggacttttttagtcatttctgatagacagatgttaccaagacactgctcttatcaagtcacactctcaaggccacagatttgccaggtttcattcctcctcattaggctgcccgggagagctcctggagctctgtcccttccagccctgcggcctcccttccccacaggctcctgcgagtagactggctcccaggtgcccttattttgtgtccagctgtgaactcttcatttaattgccaggtgtcaccgaatgaaggaggcactgtccacagccccttttacagacaaggagactcaccctaaggtgtcacttgcccaaggtgacacggttgacgcgagaggccggatttgtaccagggccatctgagtcaggatctggactccagaccaccacaggaccttcctccctgctcagcgtgcccgtcattggcattctgtctgctcttccaagtctcactctcaccagggtgcttgtgcaactcccccaactctgaccctctgggtacgtcacctgctgcaaggtgactaggaagctatgggtttcccaaagaatgcttgcttcagggctgggcgcggtgactcacgcctgtaatcccagcactttgggaggctcaggtgggtggatcacgaggtcaggagatcgagaccatcctagctaacacggtgaaaccccgtctctactaaaaatacgaaaaaattagccggcgtggtggcgggcacctgtaatcccagctacttgggaggctgaggcaggagaatggtgtgaactcaggaggcggagcttgcagtgagccgacatcgcaccactgcactccagcctgggtgacagagtgagactccgtctcaaaaaaaaaaagaaaaaagaaagaaaagaatacttggttcagggagtccgcacccctcccggattcatcagcagaatggcacacatatgtctccggccgagacggtctggcaccatcatctatcccaaaggagcccgagcccccgggcccattagcaatcatctgcgctttaacaggcctctcttcaccacccccacagccgccagctgtgaggtcgctgccatctccttcgtgagaccctcctgtggttcttctgagccctggagtccacgaaggaaacatgggggcatctttccctgcacagagaaatctgtcttagccagctgggctccaggtgggctctgggacgtttgtgcctcaccagccccgatgcccttcccagtcaaggtgggccacacccactcggggatggcaagcccagtggccacagctcaggccccacagccagtcccagctctgcaacttctaaactcagatacttcatcctcaaaatggggtgacgagttcctgcctcacacgattgtggggactcatggaactgggcctggcgcgggttacaagctgcattccaggcagttgttttccctcccccaggacattaggattccatgataggcaaagtgtgggcgttgggggaaaagggggtgcgtagttcctttggtgaagtgcataagaattcccccactgtttccatcagcccctccaacggggatgtgtggacggtccctgtgtctctaggaaaaggacagagccttggtctcatgaccgactgactccctccctcgaaggcctgttggcgtgggtgggtggcagcggccgcccgtctccatctggtcaggaagcaagcaggctttctgcgtagggatgcctgtctccaggggcaaccggatgagcaaagaatggtgttctttatggcggagtgtctccagattgttctgtcttgggtggtgggggccaggaagccccaggcacacagtgccgcccttcagcgggggcctgggacacagaggtgggccagacccctgggccagtgccactgccaggtgtgccagccttgggcacaggctttgggggaaagagtggggttagtgtcatccaaaagccctgggctgtcctcagagaaggcccatcacagagcacgccctggggtggccaccagcctcggccatgaaaggcaaggctttggttttctctctcctcagaaatcaacgaccgggagcagaagttgcatgcccttaaggaggtattaaagaaatttccaaaggaaaaccacgaagtcttcaagtatgtcatctctcacctaaacaagtaagtcgcagggccttctggttggtttttcctcctgaaaattgacagccagggtcagtgtgtcgcagaacaaggctctgtccacaagccagtagaagcctcaggccctggcctggaaggggtgctggctggcctcccatggtgcccgctggtctcggtgcccagagcctctgcctctcgcccatcctcaggcctccctcctgctcctgtctgagggcagcccacgtggcctcaaacctgcctaacaccagatagggcacttagctccagcgggcatggggcctcttgtaggcctgtgtcccaaagctggcagagagagaagatcttctggttggtactgatgctccagaaatcttctcctgaatcaaaaacacctcagagtccctgaaagtcctctcacagcattcacgttcccagctggggagaaccgggacactgcacctcgagagatgtgctgcaggagacagccagcctccggcatggagcacagccgcaggcgggaggccgtatggttgttccctgaagttccatgtgtgtggaggagatctgctggccgagtggcctctgatggcgctctggcttaggacactcagcctccctccctcgtcacagccggagcaccgccactgctttggctggctgcagagtgagtccctgaggtggtccatccacccccaggggtttgcggggctccaggcagcctttccgaggttggccatgtagaggcactgggctggaggggagaggacactgagggcgcagcctcccaggcagggcagggtacagagagctgcgcatggccttttctgctccacctgagggaagaaaggtgggctcagcctgggtgctgaagaccatgagcgcccagggccaggtggggccctgcacagttctgaccattgagtttggtgtcgcccgcagggtcagccacaacaacaaggtgaatctcatgaccagcgagaacctctccatctgcttctggcccaccttgatgagacctgatttcagcactatggacgccctcacagccacgcgcacctaccagacaatcattgaactctttatccagcagtgccccttcttcttctacaatcggcccatcaccgagccccccggcgccaggcccagctccccctctgccgtggcttccaccgtccccttcctcacttccacgcctgtcacaagtcagccgtcgcccccacagtcgcctccacccaccccccagtccccaatgcagccactgcttccctcccagcttcaagccgaacacacgctgtgagccaccaagacctggggcgacaggagaaccggtcctctctctgacggggtggcatttggccttgaacaaaaccaagtccactggggacagaggcaggggcaagtggctctccccattaccttctcaagacctcagtgggagcaccagccaatggtaccatcggctgggctgccaggtaccctgggcctggcgctgcagacctgagctggcttggacccatttgaggactgaactaggcaggcaatggctccagtgccctccctctgttccctggaccaccaccccacgtagctgctcacaccagcctccgggtgcctccctctgcttgtacagagcccatggtcgggacagtgccctggcctttgccggggaggaggatgctctgagattcagggtggggctggcaacccctgaagagaacacttcctgttggtctgtctcttcccaccttccatctgcacacacccccaaggtaagggtacagcccggctggcggcctccttgggaacgtgtaggccacggctctgccaccactaggtacctgctgagggcgctggctctgcagatcagaacaacggaggatagctttgtgcctggacccagagagtgtgggactccccgcttcatccccaccgtcccactccacagccttcccgaaacattccctggcaaacaaaggaacactaggagaaaaaatggaaaaacccttccagtaattaaaaaggaagaaaccacagaaagaaaactacagacctcaagattccactctgtgcccgcctctgccgggagggagggaggcacacaggtggagctgaccctcgtctttgtggcagcaaaaccaggatgcctggagctgtggcctgagggcctgctggggtcccactcacccacttaggtctagtcgctagatcccccgttttcccaagaagagggttcgagcccttggtggggacagctggggagatggcagtgcaggctggaacctgggctgccccagaacacagtccattacgatagaaacactaattgagcatgtgcgtggggtgggggtgtgtgtgcacatgtgagtgtgagtgtgtgtgggcgcttggtggggggttggggacagctggaaggtgccaggtgcacttggggttggggttggtgtgttgggtgttgaagtggaatcgtttcatcccagccatggaggccaccagcaggagtgttcatggggatgtgggcgaggtggggcactttgaaggaatggcggtctgctggtgccctcgaaggggcatccttcctggtcttcgctgacccagaggcgctgtgcctgcatatcatccaccaccaccctagcccagccttcccactgccccaggaaaagctcttctcctggccacctctgccccccagcacctcaaacttgcatggctgggctgtggcctctgcggccaggaagcctgacactaggcaccccccaggcgagagctagtggggtgcagagggccccatgccagacagcccttggggctcgttgcactttaagaaataggatctgtggtgtattccagggggcctgatggacacctttcccgggcgtctgcagctgccctgcccgtgcccgcctgcagtggttggagacgggagtggcccttcggctcccgagctccctctggggacggctggctcactgtctccagttctcaatggccaacgaaggtgcttggaaacacctaaccttgcaagttttaccgccttttgaggaacacaaatcggagaacaaacccagggttcaggcgtgttttctgtgaatgttggatgatgaatttttgtctcttctggtggagctgtgcctggccctgtaggcccagggttggctggaaggtgacatctgtgtttcgttttagctgaggttggcagaaacgttcccaaactcccccagccctggaccccagcagatgaggaaacggccccatttactgaccccgcccccttttcgaggttatgctcacctggtcagctcctcacgtaattgggggtggagggaaagcatggtggtgccctgggccgtccctgtgtgaacgcaggcaaaagcagcccagtccccctcactgcttgagctaacactgccacctcttttgtgtgagcacaaaagccacgtcccaagccacctggcccgattccacagatgtatgtgcggccagtgacttccccaggagtgtggagggggtggtgaggaggagcacctgggctctctacccctctcctcacagaagtacctgaaactaggtctggggcactcccaatgcagcgccttgtcagccaaggtgggcaggcagggactgtggcagcttatgtccaaagggagcccccatgcacaggaagccacagggttcctcttgtttcccccgctaacttcagcctctcatctgctgctccgggctgagggactagaggacatctcggtcgtttgaggggcatggccagtcgtggcaggccggccttcagcgtccggtcagggaagcgtgcagcccaaatgggcacttgcatgggagccacagaggagcgtccctggggattgttgggaccatgctgcccccactcccgcttttgttggggctctaagttctggaaggtgtgtgcacagagggtgctcatgggactcgcatgcagctctcagcactgggtgggagggcgttggcttgtccagaatggggacgtggggcagccacccctgcccagcgagagcgcagacaccgtgtgaggggacagcagcccttggtgcaaagccagagactgatcctggctctgacggctgaagagggaagacccaaggctgggtggcgtggctcgtgaatccacttagaattcttggcttgtgtcgcatactgggtgtcacggcacacatttactctgcattgtccccgtctttcccatcgcctagcgtttggggaggaacagggagagagcttcggggcgtctgtctccgtgctctcctgcctccaccgccttggttttgcttcctgctggaggcagggcacctgctgcgacccagattcttctgcaggatgtgtctgtctttgtcacggtggacagagggtgacatcataggagcagctcgctggccagaaggggatgggggcatccctgtgcctcactcagctcctgctgctcttagggaaaggaggcctgggtcaagccagcatccccttggtaaagacccccgcaggccaccaggcattctggacacgcacacacacacacacacacacacacacacacaaaacttcacagcaggccagctgcagtgacttgtcatcaagagtcacctcagctgcgcccccctcccatcctttcctatgagaagccactgctttgggggcgccggctagaaaaagtagggtgcggtggccaggagggcccctgccgcgcggggggctgggtctggttgagtcgctgctttcccgagggcagcgcagggatccggggaagctgcggcagggagcgggcgccggcttcgtggctctgaggtgtaacgggggtgggctccctccctcggaggacatcgtctgtgtccaggtcagaaagtggcccaggaagggggcagtttctgtcgcgggtccggtgggggcgcggccgcggtgcggtcggtgcagcgtggccaatgcgcggcgcgcgcgggggacagagcaggaggcggtctgtcacctcggccactgctgacctgggctggcctcccccagccctcccgtggcggagccggcagcgatgctacaggcctaagttattgtttgcataaaaagaatcatgttccctgtgtacatttaagaaaaaaacaaaaaaacggaaatgtcagaattgtatggaaataaaacttgtttgaaaatttggaatagtgctgctgccagcttatttttctggtacttgtattttcacatgttaaatgatctttatatatgttgaattaacaaatattttgagtttctgagaaaaaacaaaacatattaatggtattgaaatgtgttagtagtctggctgtgtgcccaaaattctgtttcgcagcaaaagtgaagacctgtatgtaaagaaagtataacaattatttctttgtattttaggggctttaaccggaacatcgtctagctggtgttaggaatgtttgcttaatttccagacttttttttaaaaacacatcgtgggttttttgaggctccaacctgattagtgcatggtcagccctcaatgaaggctgaggcatctctgactgaggtgtttttgtttggttttgttttttaaaatcatgtatttgctacaaagtattgtacttgtctcaatgggaatggtgtaaaaaacaaaaggccttatgtgatctgtatcatagttaataaatgaatcttgtaaaaaaccaaacctgagagaagtgaaggggggcctcctccttaccgggccagtgcagcacacaccagggtttcacaggcttaggcgcccggggggggaagcaggaggctcccacaggagaggcctcggccagcacgagccccccctcccggctctcacctgctttcctctccagcacagcttcccagaaggccgcgtcattcctgtggtttctcagcatcacctaaagtgcctcccacaaacccccatggccgcaggagctgcaggcaggcgtggggaggggatgccagaggtgccgctcctgaccttccttcccactcccctccggcctgaggccacgcgggtggtaccgggagtcagatgcccctgttcacttcctgggtgagttccaggggcagggtcatgagcaggcttgtggccaggaggtggccgacctcagacccttctcaagggaggggtcagggctgaagttctgagaggggagagcctaaggtcacactcactccctggtgctggccctggggtcagagacccaggctctatgccagagttagccaccgtcaccaccgtcatccaggacagcacctccagggacggaggtgggctgcttcccaaagaagccttgccaccaaaaacacctcctctctgctcaccccctaaaaaactctcgttaggaatatcttcctctttccagtctcccaggctcaagtttgctctatccttggccccctccttacttacccctgactgcttctaagatcccaaatgtcacttgagcgtgactctgctgttccctctgcctccattctagcctagacctgaattcaagctcactagactctgatagacacccccacacactgaatggcccccctgccctcaatattcatggcagaagagtgaactattcagcatacaagatgcatccttccctgcctgtgcccatagcagacatggctagctgatcaccgcactctgccacacccctctccaggcagccactgccaatcaataggggctggcaccagagatgacgtctgtttgccactgcctcagccaggcaggcaaacaaacggagatgcctactgaccatagcccaggctccttggcatccatgcagaaccccacgctctgtctggatccatcctgctcttctctcccactcctctaacccaactccccaacatcagtcaaaattagtctttttttttttttttttttttttttttttttttgacagagttttgctcttgttgcccaggctggagtgcagtggctcgatctaggctcactacaacctccgcctccccggttcaagggattttcctgcctcagcctcctgagtagctgggattacaggcatgcaccaccacacctggctaattttatatttttagtagagacgggatttctccatgttggccaggctggtctcgaactcctggcctcaggtgatccgcccacctcagcctcccaaagtgctgggattagaggcgtgagccacctcgcctggccgagtctcattcttttgagtgcagctggctgctttctgcttccagatccttgctttgagcacttccctctgcctgaaattccttccatccacccttccccaaacctctagcctgcccatcagatcctaccctgttcttcaaagccagtctttctccagaaacatccctgaccctctccactcacggattcaccctgcagctgggatttacctgctgggggtttatgtcactccccgtgagcgctccagggtttctcctttgtttttttgaattaaatctctacatcctcctggtgtgcagttggtactcaatgtgtgctgacagaaacctgtcttctctatttttttttttccttttcttagtctgttgtccaggctggaatgcagtggcacaaacacggctcacttcagccttgaactcgcaggctgaagcaatcctcccacctcagcctccaagtagctgggactacagaggcacatgctaccacatctggcttttttttttttttttttttttttttcagagatgggatctcgctctattgctcaagctggtcttgagctcctgggttcaagcgatcctcctgcctcgacctcccaaagcactgggatgacaggcatgagccaccatgcccggcctgttcctcccttctttgggcaaaggctgagccatctgggggccccgctctgtgctaagctgggttgagggagagaccagaaccagataggcagtgggctctgggtgctgactggccaaggagtgtcttttttttttttttagacggagtctccctctgttgcccaggctggagtgtgatggcgcgatctcggatcactgcaacctctgcctcctggattcaagtgattctcctgcctcagcctcccgagtagctgggattacaggtgccgccaccatgcccagctaatttttgtatttttagtagagatggggtttcaccatgttagccaggatggtcttgatctcttgacctcgtgatccacccgcctcggcctcccaaaacgctgggattacaggattacaggcatgagcctccatgcccggacttttttttttttttttttttttttttttttgagacaaagtcctgctctgtcgcccaggctggagtgcagtggtgtgatctcagcttactgcagcctccacctcccgggttcaagcaatccttccacctcagcctcccaaagcactgggagggcaggcgtgagcccctgtgctcagccttctctcgctcttgctcttcaagacttgtgtgctttctaaacacgagcctcacaaccaccagcacccacgttgagagctttggggggcagcttcgcggctcccagataggccaccccaggaggcccaacaagatgccttatgcgtggtaagccttcattcggtttttcgaacgcggtggtctcaaccttgcccttgacctgccccatctgtaaaccaccctctcccacgtgactccagcctagacctccgctgcaagcaaaacatcatatccacctgtctatgacactctacttggggactccactgtgacacacccacagccaaactcctgaccctttctccaaacaggtccattccccaggatccccccctcaagccagagagagaccctgggggcccccttggggtgtctctctcccttccagtcaaccaggtacaactcccagttccattttgccttccagcacactccccttcctgctccctgcaccccagccctgtctgatctcaccaagacatctgccctccatgctcacccactcccatctccatgagggcagatcagatctcacatctagccatgtgtctcctcccgtaacatcctccagggatctccaatgcccttagaggaagcctgaactcttccacagggtcccacccccgaccccgcccacctcccaggagcctttccttgcactctggtccagatactccaactcccctggggcctgcccacctcgggcattttgcagtattgtcccctcctcctccaagactgtcctcccttgaggccatcccaccttgctaactttctcctggtccttcagatttcagctcctcagactcctccacagggaaagccctccctgactcccccagccaagatgggtctctttgctttcagatgagatcgagtgggttcagggtgtatggccgtagactctccgtgctttcaaaggaaaaaaataagttctttcagagtactttctgagctgagcatggtggctcatacttgtcatcatagtgctgtgggaggccaagagaggaggatcacctgagcccaggaattcaagaacagcctgttcaacaaagttagaccttgtctctacaaaacatttctttttttaattagcagcttggggccaggtgcagtggatcacgcctgtaatcccaggactttgagaggccgaggcgggcagatcacctgagatcgggagttcaagacacagcctgagcaacatgaagaaaccccgtctctactaaaaatacaaaattaggagctctccctctccgtctccctctccctctccccacggtctccctctccctctctttccacggtctccctctgatgccgagccgaagctggacagtactgctgccatctcagctcactgcaacctccctgcctgattctcctgactcagcctgcggagtgcctgcgattgcaggctcgcgccgccacgcctgactggttttggtggagacggggtttcgctgtgttggccgggccggtctccagcccctaaccgcaagtgatccgccagcctcggcctcccaaggtgccgggattgcagacggagtctcattcactcagtgctcaatggtgcccaggctggagtgcagtggcgtgatctcggctcgctacagcctccacctcccagccgcctgccttggcctcccaaagtgccgagattgcagcctctgcccggctgccaccccgtctgggaagtgaggagcgtctctgcctggccgcccatcgtctgggatgtgaggagcccctctgcctggctgcccagtctggaaagtgaggagcgtctccgcccggccgccatcccacctaggaagtgaggagcacctcttcccggccgccatcacatctaggaagtgaggagcgtctctgcccggccgcccatcgtctgagatgtggggagcgcctctgccccgccgccccgtctgggatgtgaggagcacctctgcccggctgcgacccggtctgggaggtgaggagcatctctgcccggccgccccgtctgagaagtgaggagcccctccgcccggcagccgccccgtctgagaagtgaggagcctctccgcccgacagccacccagtctgggaagtgaggagcgtctccgcccggcagccaccccgtccgggagggaggtgggggggtcagcaccccgcccggccagccgccccgtccgggaggtgaggggcgcctctgcccggccgcccctactgggaagtgaggagcccctctgcccggccaccaccctgtctgggaggtgtgcccaacagctcattgagaacgggccaggatgacaatggcggttttgtggaatagaaaggcgggaaaggtggggaaaagattgagaaatcggatggttgccgtgtctgtgtagaaagaagtagacatgggagacttttcattttgttttgtactaagaaaacttcttctgctgtgggatcctgttgatctgtgaccttacccccaaccctgtgctctctgaaacatctgctgtgtccactcagggttaaatggattaagggcggtgcaagatgtgctttgttaaacagatgcttgaaggcagcatgctcgttaagagtcatcaccactccctaatctcaagtacccagggacacaaacactgcggaaggccgcagggtcctctgcctaggaaaaccagagacctttgttcacttgtttatctgctgaccttccctccactattgtcctatgaccctgccaaatccccctctgtgagaaacacccgagaattatcaataaaaaataaataaattaaaaaaaaaaaatacaaaattagccaggcgtggtggcgcatgcctgtaatcccagctactcgggaggctgaggtgggaggatcacttgaactcaggaagttcaaggttgcagtgagccaagatcgtaccactgcactccagcctgggcaacagagccagaccctgtctaaaaaaaagaaagaaaaaaaaagtacttttctcggtgtgttattcattcaggctggggcacacagacattaaacaaatccctgcccggagctgacatcctagtggaaggaacacagtaaacaaatgaatgtggccattatttaggcaggaccgaggagttaacgaggattcagttgttgggagcacttgcctcagttgcaaaacttaacagaacacgaaagagacttcagtcatcaacataaaaatatttcagcacaatgttttcaaaaagcaaagttgctgttagcctaatactgctctaaaaaaaaaatgtcagccacgcgtggtggctcatgcctgtaatcccagcactttgggaagcctaggcaggcggatcacaaggtcaagagatcaagaccatcctggccaacatggtgaaaccccgtctgtactaaaaatacaaaaattagctgggcgtagtggtgtgcgcctgtagtcccagctactcgggaggctgaggcaggagaattacttgaacccgggaggtggaggttgcagtgagctgagatcacgccactgcactccagcctgggtgacagagcaagactccatctcaaaaaaaaaaacaatacaaaacaaaccaaaaaaattgtttgtcttggttgggtgcactggctcatgcctgtaatcccagcactttggagttcaagatgggaggatcacttgagcccagcagtctgagaccagcctgggcaatagagtgagactccgactctacaaaaaaattctttaaaaattagctgagcaggccaggcgaggtggcttacacctgtaatccaagcatttctgggaggctgaggcgggtggatcacctgagttcaggagttcgagagcagcctggccaacatggcaaaaccccgtctcgatttaaaatagaaaaattagctgggtgtggtggcgcatgcctgtagttccagctactcaggcagctgaggcaggagaatcgcttgaacctgagaggtggagggtgcagtgagccgagatcatgccactacactccagcctgggcgacagagcaagactccatctcaaaaaaaaaaaaaaagccaggcgcggcagctcacacctgtaatcccagaactttgggaggccgaggcaggcgtatcacctgaggtcagttcaagaccagcctgaccaacatggtgaaaccctgtctctactaaaaatacaaaattagccaggcatggtggtacatgcctgtaatcccagctactcgggaagctgagagagaagaatcgcttgaacccaggaggcagaggttgcagtgagccaagattgtaccattgcactccagcctcagcaacaagagggaaactccctctcgaagaaaaaaaaaaaattagctgggcatggcagcacatgcctgtagtcccagctactcaggaggtcgacgtgggaagatcgcaggaggttgaggctgcattaagacaagattctgccactgcactccagcatgggtgacagagtgagaccccatctcaaaataaataaataaaagtcttttgggccaggcgtggtggcttatgcctacaatcctagcattttgggaggccgaggtgagtggatcgcctgaggtcaggagttccacagcagcctgaccaacatggagaaaccccgtctctactaaaaatacaaaattagccgggtgtggtggcgcatgcctgtaatcccagctactcgggagactggggcaggagaatggcttgaacccaggaggcggaggttgtcgtgagccgagatggcaccattgcactccagcctggacaacaagagcgaaactccatctcaaaaaaagagacttgtttaaaaaatcaaaattagtgcaaaaaaaccaaatccatgatgaacaaactatcaatattttaaataaagacgaatcagtaagagtgtcaagtgagtcacattggagcctgaggctaaaggagaaatcagttaagactgagcctggattctgggagtccagcaaggaggtaactacgatagtccaggagtgaaacggtggcggattagaccagagaaggacggtgatagtggaaagaacagggaattccaggtatcttgaaggtcaaggctacagaatttgttgaagatggcatgagactggggcagagagaaggtgcagatgacgccagggttgccgcatacgacagtgtgagtatctgattatcctttgtcttccccactttcctgtgaaacctacgagggcgggagctgtgcctcccaagccgcagccagcacccagcattcgctccagggctccaggccaactgccctggtggagaatgagctgtgttactccgcgcggccaccaggggtcagcagagcgccgccctgcccagccatggccatcccgggaagagtagaaagcccggatggcggctttttaggaagtaaggccggattagaaggagaagcagcagggactgaggaggaggcgggttctgagaaatggggctggaagcgaagtgtcccaggagctggccgagaagcaggggaatgagctactgtttctgtcactgcatccatccacccatttattccaccattcagtcacaggccactcagggccttgcagagccgggtgagaaactcagtgtgtcctgagggcactggggagacaagactgggtccgatttgcaggagctgagaggaggggaagaaagtagagattcaggacatgcaagctcacagccaacctgcctcccaggtgggcctgaagagcatgcaattaacataaatgttagcaaaacaaataatattggccgggcacggaggctcacacctgtaatcctagtgctttgggaggctgaggtgggaggattgctcgaggccaggagttcgagtctgcagtgagcgacgattgtgctacgcactccagtctgggagacagagcaagaccccatctctacaaaacatacaaaaagttaatcaggagtggtggcgcatacctgtggtcccagctacttaggaggctgacatgggaggatcacctgagtccgggaggtagaggctgcagtgagccgtaatcacatcactgcactccagcctcggtgaaagagtgagaccctgcataaaaaaaaaaaaatacaagtaatattaaattaataaaagctaacaatcattggacccttacgagatagcaggccttgttttaatcgcttttcaccatcaattttctttttctttttctttttctttttcttttttttttctgagactgagtcttgctctgtcacccagggtggagtgcagtggtatgattttggctcactgcaacctctgcctcccgggttcaagcgatcctccagcctcagcctcctgagatctgggattacaggcgcccgccaccatgcctggctaatttctgtaatttttttagtagagacaggtttcaccatgttgactaggctggtcttgaactcctgacctcaagtgatccacccgcctcagcctcccaaagtgctgggattacaggcgtgagccactgcaccaggcttgtgttttgtttttgagacagggtgttgctctgtctcccagggctggagttcagtggcacaatcacagctcactgcagcctcaatctcctgggatcaagggaccctcctgcctcagcctcctgagtagctgggactacaggggtgcaccaccacactcagctaatttttgtatttttttgtagagagggtttcaccatgctgcccaggctggtctcgatctcctgggctcaagtaatcctccctccttggcctccaaagtgttcggactacaggcatgcaccacctcacccctcacccagcccttttcttcttttttttttttttttttttttttgagatggagtcttgctctgttgcccaggctggagtgcagtggcctaatctcagctcactgcaagctctgcctcccaggttcacgccattctcctgcctcagcctcccgagtagctgggactacaggcacatgcccggctaatttttttgtattttaagtagagacggggtttcaccgtgttagccaggatggtctcgatctcctgacctcatgatccgcctgcctcagcctcccaaagtgctgggattacaagcatgagccaccacacccaaccttctttttttttttttttttgagacaagagtctggctctgttgcccaggctggagtgcagtggcgcgatctcggctcactgcaacctctgtctctggggttcaagcgattcttctgcctcagcctcccaagtagctgggattacaaatgtgtggcaccatgtccagctaatttttgtatttttagtagagatggggttttgccatgttggccaggctggttttttgtttttttgttttgttttgttttgttttgtttgagacggagttttgctcttgttgccccagactggagtgcaatggcaccatctcagctcaggctcaccgcaacctccgctcctgggttcaagcaattctcctgcctcagcctcccaagtacctgggattacaggcatgagccaccacacctggttaattttgtatttttagtagagatggggtttctccatgttggtcaggctggtctcgaactcccgacctcaggtgatctgcccgcctcggcctcccaaagtgctggaattacaggtgtgagccaccatacctggccgataaatatttgttgaatgaattcattgaatgctgacagcaactccacgaggaatgccttggggcttgttttcctattatttatctgtgaataagcactctattgagattgttcccacgccatacattttacacgtttaaagttgtgtttagcagagttaggggttttttagtgtattcacagacgcgcaaccatcaccacagtccattttagaacattttcatcacccaaaaagcaagcatgcagccattagcagtcactctccattccccggtattagtttgctgggactgccaaaaccaaggaccgcaaactgggcggcttgaaacaacagaagtgtcttctctcgcagttgccagaggctggaagtccgagatcaatcagggtgtcggcagggctggttgcttttttttttttttttttttttaatttgagatggagtctcactctgctgcccaggctggagtgcagtgatttaatctcggctcactacaacctccacctcccaggttcaagcaattctcctgcctcagcctcctgagtagctgagattacaggtgtgagccaccacgcctggctaatttttgtatttttaggagagacagtgtttcccagtattggcgaggctggtcttgaattcttgacctcaagtgatccgcccaccttggcctcccaagctgctgggattacaggcttgagccaccgtgcccagcctctttctgaggctgtgaaagagaatcagtcagtctgtaatcctagcactttgggaggctgaggcagacagatcatgaggtcaggagtttgagaccagcctgactaacatggtgaaaacccgtctctactaaaaatacaaaaattagccgggcatggtggtgcatgcctgtaatctcaactgctcgagaggctgaggcaggagaatcacttgaaccctggaggcagaggttgcagtgagccgagatcgtgccactgcgctccagcctaggcaacagagtaagactctgtctcgaaaaattaaattaaattaaattaaattaaaattaaaataataattataagcccattacaggccaacataaatattttatgaaaaatatattttccaattaaaaaaaaagttagtgaagggagtggcattcttttacatttttgcaaatctctttaacgtccagcttttatagaagatggctggaccttgggctgggcactgtgcttacgcctgtgatcccagcactttgggaggctgaggtgggaagactgcttgaggccaagagttcaagacaagcctgggcaacatagcaagacctcaaaaaaaaaagaaagaaaaagaaagaaagaaaagaaaagaaaaggaaagagagagagaaagaaagaaagaaagaaagaaagaaagaaagaaagaaagaaagaaagaaagaaagagaaagaaaaagaaagaaagaaagaagggaaggaaggaaggaataacagtaagaagaagatggctgggcctcacggctgcttctgcatttggtctgttgtgatatcacacatcacacagcatctggaaatctccaccagacaacagaatgaagtgaaaaaggcagaaaatgtctcggtatgaaaatttgacccagcacaccgaagagaccagttctcaggtcacattgagaccttctaaaataaacttattttatcttcactatgatgctatgaggtgggtactagaattaaaatatcctcattctacaagggagaaaacgaaggcccagagaggtgaagttacttgcccagagtcatacagcagtaaatggcagagctgaggtttcaacaccaccaattactcttaacctcacaaaatccatgtgtaggccaggcatggtggctcacgcctgtaatcccagcactttgggaggctgaggcgggcaggtcacaatgaggtcaggagtttgagaccagcctgaccaacatggtgaaaccccatctctactaaaaatacaaaaattagccaggcgtagtggtgcgcacctgtaatcccacctactcaggagactgaggcaggagaatcgcttgaacctgggaagtggaggttgcagtgagccgagatcctgccactgcactccagcctgggtgagaaagcgagactccatctcaaaaaaaaaaaaaaaatccgtgtgtatgtgcaatcataaataaatacaggccaggctgggcgacctggctcacgccataatcccagcacattgggaggctgaggcaggaggattgcttgaagccaggagttcaagaccagcctgggcaacatagcaagaccctctctctacaaaactttttttttttttttgagacggagtctcgctctgtctgccaggctggagtatagtggcgtgatctcagctcactgcaacctccgcctcccaggttcaagcgattctccagcctcagcctcctgagtagctgggactacaggtgcacgccactgtgtccagctaatttttgtatttttagtagagatggggtttcaccatgttggccaggctggtcttgaactcctgacgtcaggtgatccacccgcctcagcctcccaaagtgctgggattacaggcatgagccactgcgcccggccaacaaaacatttttaaaaaatagctgggtggggtggtgcatacctgtagtcccagccacttaggaggctaggtgggagaatctcttgagcctgggagttcaaggctgcagtgagtagtgatcatgcagcctgggtgacagagcgagaagactgtgtctcaaaaataattaattaattaattaatggcacaagtgtacctctcatggctggcatagcacctgcccaggctgcacagccaggaagtgctgtcaggagacaggagcccatgatctgagcttgattccttgccctgaaactctagcaagtctctctggggataaataaggatctgttgtctgagaggccactatcaccaggctatatcacttccccatgtctcggtttccctagttgtaaaatgcatctagtaacagagcccatctcagaatcttgctataaaataaagtattagcaaaaaacaagcactcccttaagtgttaactatgaggatcatgaatgagtttgtgtgttgtgagcaaatgcacacgggtgtttgtgtgtgcctcagtttccccatctgcccaaccaaaggccagcgcgtgctccctgcaagcccctgactgtatgcctcttctaagactccctgctccattttctttttcttttcttttctttcgaaatggactctccttctctgacccgggctggagcgcagtggcgggatctcggctcactgcaacctccgcctcccaggttcaagggattttcctgcctcagcctcccgagtagctgggattacaggcgcccaccaccacacccggctaatttttgtatttttagtagagacagggtttcactatgttggccaggctggccttgaactcctgacctcgggtgatccaaccgccctggcctcccaaggtgctgggattataggtgtaagccaccgcgcccggccccagctccattttctttccccatgttaaggtcatgtagaggcttttaagtgcctggagacccccatgccagggaggaccctgagaacgggaagtgggggctgcatggagagaaggagctaggggaactgtaggacctcctatcagactggggaaggcctggcttggacgcctgggttcccgtcctctgtgcgaggtactacaacccctgagttcccatttatgatctaatggggagcttggatgtaagggttcccgtccctgcggcgggggatggagataagacgccaggatcctggtctctggagctccttagagagctggatcctggtccctgacgagggaggtgtatgtcccccttttaaggcgggttgggtttggatgcgaagtcccagccctgtggggggagagtgtgctgacactcaggagttctctcccggaaagggagggtctcgaattctggatttgtgtccctggaggaagcactgacgtgagtcttcactcgtacatggggctcggctgcagggtacctgtcttgtcccgaggggctgctggggcactaactgcctcctgaaggggtgtagacagtgcccggactccgctgttccccttttggagtggggtagctccgatccgaggtgctacattctgacccccgacgttaccgtggggcaagggaactcggaccccagggtagcttggccccctaccagggaaaggcgagcagggcgggtccgggggcggagacgcggcgggcggggctccggcagaccccgcccccgcccgcagcgctggtcgcgcgtctccaagtctgcgaggccgaggtgggcgccgagagctgggcgccacagcccgcgcgtcccgctgcgccccgcgcgccccggggtctatggagctgcccctccgcgccgcccggccggccccacgccgcgcccggagcctgctctgcggccaagtaatcggactggcggtcctgcgggtaggggaagcttgcgggctggcaggagggggacttctgggtcccagaggaatggggggctggaactccagtgtcctgggggatagggggtgggacgagggtatcccgagcctgggggaaggggcgcacggatgtttgagtcctggagaaatctggggttgggagacctggacacgggggtctggggcatctggacacctggctgggaggtttgggggcggcctggttcctggggttagggggtgttctgaacgcctggtcctggaggaatgaagacctaactgaaaacgttaggggatcaggagaccaggacacctgggccccgagtgtcgggtcaatcctgggggcgtcctggggcagaggctgcggcggctgcgtccggggctggggctcgcgcgccggggtcttcagggaggaagttgtggtcgtggggatgtggcggtccgaacacgtggcgccatcccgagaggctggggggatccctgggcaggacacaggatgggggtccctgccctctgccccctgcctccttagcccagccgggaaaacagggtgcagatccggggagtcagacaccggggatgggcttggggggcgggtcctcggggcagagggctccgggggctggggcgtgcgtgcctggcccgggaggcgcccgccccccgcccggcttgggcatgcttggcacgcagcgcgcgggccggttcgatccgtatgcgcgccgcgtgcgcccattggtatgcgggagccggcccggcgcgggcgtgaggcgggcgcgctggcgggcggcgcgggggaggcggcggcggggcacgtcctcacccggagcgccagccccgggccggctagggtgggagctgaggcctccaggtaggggaaactgaggcatcatccaggcccccccccccccagctccttgctgggaccctgagccctgcacggatctcagtttccctagaaggtctcccgagggcactaagcgttgcccctggccccctcccgctgcaggagactcggggctcggagcccgcctgagcgagccccccggagatggcggccccctatcccggcagtggcggcggaagcgaggtcaaatgcgtgggaggccgcggcgccagcgtcccctgggactttctacccgggctgatggtcaaggcgccgtccggaccgtggtgagcaaagccccgcccccctggccgcgggcccccccccgggtccaattcacacccgatgttctgtccccgtgccaaggggcagttcacacccagctccctgacccgccccttagggctagaaggtcttaccttgagttaactaccgtcctgagcccggtcccctgcgttctgcttctagtcccggtcctcagaattcacgcccaacatctttaatctctcgcccttcctcctccttcccaccagaattgacactcgaggttctgtccctgggtcggagtgtaaaatccacactccggtctgctcccacctccagagatgtggaatccactcccaacgtcccgtcccgttcccaaggccccgggaggcggggctcgcccccagttcccaagcccctgagccccggggccccgccgacacctcctccgcgccgcccgcccagcctgcaggcgcagcgcaaggagaagtcccggaacgcggcgcgctcgcggcgcgggaaggagaacctggagttcttcgagctggccaagcttctcccgctgcccggcgccatctccagccagctggacaaggcttccatcgtgcgcctcagcgtcacctacctccgcctgcgccggttcgccgcgctgggggcgccgccctgggggctgagagccgcggggccgccagctggcctcggtgagtgctcatgcgcggggcgagggtcccggggccctccaggcggagtcactgcagcccagatccgggctgcgggcctgccctcgcccagatgcttgtctctggagtcagccaggacctttgcgtgtccctatcaggtggcttctgctctccaagcctcagtttattaaactgtcaaatgggcgcaagaggttgggaagatttcgtgaattctgccctaaacaaggccctggcagttctagtggtcactggtaaatgctattcctatatttttattagaggagaggaatcattattacaaccaaagaaactcccagctgcatgagcgggacagaggggactcaccctggcttgggacgcccattcgctaatgggcgagataccctggatccagacctgaggggccccggcgggaacgcaaggactgtacagtctgagcccccagttggaggagcaagagggagacagtatgatgtggcggatgagatggggaacttcaggaagatgccccagggttcctgtcgccgcgcagccacctcccagctttgcaaccccgggcaggtcgcctcacttctctgtgccttaatgtgaagtgggaaaaaacggtccaacctcccccagggggctgagcagagaatcaaccaggtcatatttgcaaagtccctggaagtgcctagctcagagcaagccaccgctatgcggccaatgctgttatcagcagtaaccttgcagggctgctggaggggttcggggcatggaggagggggcgggggggctgtcgcttttggagcatctcctgcctgtctggcacttttctgagcgctgggattgagcaggagaaacaatctagacaaaagtccctgccccggagcggctggcatcctagtggccaagacgcaataaagaaataggcaaagcaatataatctagaatatgtaaaaatataaactctgtaagatacagataaatatctaagtttattattattactcagactttattattgagacatagaagtgctgttatgttattattacttctattttatgtgtttgttacagctttgcggtgatgaggataaggcagtgtgagtggtgtttatctgaagtctcagggcaccccaggctacccctgtccccacccctccaggagaagagggtgtccttagggtggggttggaggggctccaattcccctcctgccccgtcccaggggaagaggggggagagaaaatagcattgattaagctcgcaataaatcaccatttaaatttaaataatccggcttcccaggcggtaattaggcgaattgactggcgcggagagaatgcggcattagcgccgctgattactgtcattaccgcgaacaacatgtgcgccggcgggggataaacatcttgtctattgtccccgagctgaagggggggaaagggggggctaagagagccccggcggcgtccagccccccattacctggatgagcattccggggctcagaggcatcaggggctggctgaggtcacagcactgacgtggcagagcatggacttaatcgatcccacctcgaccacggtgccaagtggaagtagggtcaggacagtgtgggggggcttggtactgcgtggactcctatagtcccaaaactgggaaatcgggggacagaggcatttctagctctacagggtccctaacaagaggcgaagcacctgcttccatagttcagaggaggagctgaggacagcattttagctgaagccacagagcagagcactgtcagtcacactctctgaaggggaggggactcccatgccctcctcagtaataagccgggcaccatggctcacatccgtaatcccagcactttggggcgccaaggtgggaggaaagctttgggccaggagttcgagaccagccagggcaacatagcaaaaccctgggcaatataacaaaaccatgtccctacaaaaataaaaatattggctgggcacggtggctcacacctgtaatcccagcactttgggaggccaaggcgggcagatcacgaggtcaggagttcgagaccatcctggccaacatggtaaaatcccatctctactaaaatacaaaaaattagccgggcgtggtggtgtgtgcctgtagtcccagctactccggaggctaaggcaggggaatcacttgaacccaggaggcggagattgcagtgagccgagatcacaccactgcactccagactagtgacagagcaagactccatctcaaaaaatatataaaaataaaaataaataaataaattagccaggtttggtggcacccgcctgtagtccctgatactgaacaggatgaggtgggaggactgcttgagctgaggaggtcgaggctgcagtgagccatgatcatgccactacactccagcctgggcaacagagcaagactcagtatctaaaataataacaataatagtaatcatatagaatgcatgcatcagaccctgggataagccctgtatacaaaatgactttcttggccgggtgcggtggctcacgcctgtaatctcagctctcagggaggcaagaggcgggaggatagcttgagcccaggagttcgagacctgcctcggcaatatagcgagaccccgttctccagaaaaaggaaaaacaacaacaacaacaaaagataaaatgactttctttttcagagggaggcactattatgattcccaagttacagaagtgtgtgcccaaggtcgcacagctgggattcaaacacagatgaccttgccccaaaggccgcctctcaaccatcatatgtggtctgtaggtctacagggatgggttctaggtctctgcctctctgggcctcagtcctccatctgtgaaatgggacaacagatgttcaagtctagccctgagcctctgagtctggagaggagaccgcccaaatctcatgtcagcattccctattgctttttttttttttttttgaaacgcagttttgctcttgttgcccaggctggagtgcagtgttgcaatctctgctcactgcaatctccgcctcctgggttcaagcaattctcctgactcagcctcccgagtagctgggattacaggcgcctgccaccgcgcctggctaattttttgtatttttagtagagatggggtttcaccatgttggccaggctggtctcgaactcctgacctccttatcctcccaaagtgctgggattgcaggcgtgaggcgccgtgcccggcttttacagccttctttcttcccatagcacttattgtcatctgacactctctgtatttatcttgttattttgtgtcattcaccaacagcctcttggttgctgagcctggagtagcatctgggacacaatgaaggcttactaaattgttgagtgactgtggcagttgagggaaggaggggtgacatctttatttatttatttatagacggagttttgctcttgttgcccaggctggagtgcaatggcatgatctcggctcactgcaacctccttctcctgggttcaagcgattctcctgcttcagcctccctaatagctgggattacaggcatgcgccaccacgcccagctaattttgtatttttagtagagatggggtttctccatgttggtcaggctggtctcaaactcctgacctcaggtgatccgcctgccgcagcctcccaaagtgctgggattacaggtgtgagccaccgcacccagccctttttaaatttttttgaaacagggtcttgctctgtcgcccaggctggaatgcagtggtgcgatcttggctcactgcagcctccacctactaggctcaagagttcctctcacttcagccttccaagtagccaggactacaggcacacgccaccacgcctagctactttttgcattttttaagagacgaggtctcaccatgttgcccaggctgctctcacattcctgggatcaagtgatttgccaaccttggcctcccaaagtgttgggattacaggtatgagccactgtgcccagccaaggggtgacttcttagctcataggtcaggcacatcctcgctgaggaagtaacgtttttttgtttttgttttttgttttttttgagacagagtcttgctctgtcacccaggctggagtgcagtggtgcgatctcagctcactgcaacctccacttcccaggttcaagcgattctcctgcctcagcctcccaagtagctgggttacaagcacacgccaccatgcccagctaatttttgtatttttagtagagacagggtttcgccacgttggccaggctggtcttgaactcctgacctcaggtgatccatccacctcagcctcccaaagtgctggggttacaggtgtaagccactgggcccagccaaggaagtgatctttgagctgaggctccaaggaggtgtgggagcagctgtgagaaaagctggaagagagtgactcagcagagggaacagcaggtgcaaaggccctgaggcaggtggggatcagcttgctgggtgcagagcctcatgcactgtggtaggggtttggctgttacccacagtgagaggggagccacagaggtggtgagggcggaagtaggagcccagtgaggatgaggacgtggtggtccagccagggcagctagactgggctggggccatgggtggtggaacacaggtgacatggtcaggtccaacccctgggacttgcttaaaatgcatgtgggtgtgagagacacagagggcggcctccaagaaaccgcccgaaaaggcagtggtgccctgatgttatctgtagtcatactgaaaagaaaagtgcggccggggcggtggctcacacctgtaatcccagcactttgtgaggccgaggcaggtggatcacctgaggtcaggagttcaagacaagcctgaccaatatggtgaaaccccgtctcaactaaaaatacaaaaattagccgggcatggtggtggtgcctgtactcccagctacttgggaggatgaggcaggaaaatcacgtgaaccaggaggcagaggttgcggtgagctgagatcctgccactgcactctagcctgggtgtcagtgctagatgccgtctcaaaaaaaaaaaaaagagagagagagaatggtggcatgactcccagtattaggcacctactgtatgcactagcccattcaactctatcactgtagacccattttacagatgaggctgaggaaagtaaaggcaaaggtgacccggcactgccccaccccatggtgcttgcccccatgcagccctcaggcctgcggcgctttgacgatggggcatgtgagggacccctctccccgacttccctgggtgatgaagccccagcctcttctctccaggacccagggtcagcacattccttcagggcagttgagaagggcaggtgacgggggagatctgggaacttggaagaggccttggcttctgccttctgcccctggatccccctctctctgccccaggtcccccctctctctgccccaggtccccccacactctgcacccggtttccccctctctctgccccctgggtccccctctctctgcgcctggtctcccttctctctgcccctggtctcccgtctctctgcccctggtctcccgtctctctgcccctggtctcccatctctctgcccctgttctcccttctctctgcccctggtctcctgtctgtctgcccctggtctcccttctctctgcccctggtctcccgtctctctgcccctggtctcccgtctctctgcccctggtctcccgtctgtctgcccctggtctcccttctctctgcccctggtctcctgtctgtctgcccctggtccccttctctctgcccctggtctcccgtctctctgctcctcgtgctccctctctgcgcaagagatgaggacactgagcaggctgtgataagaaccacagcaagtgtttgttaaatggatgagtgatgtttgggttctggacatgggagggcggatgtggaagtggtgaaaagtctcctgctgaatgtgggggacagaggagtggggacattttgaggggagagggagaggaggaaacagcgggaggcatcggggagttggtgggatcgggaggtggaggctgggggtaaaaagacacatcagtcagtgatcaggagactctgggggtccctttcacaggggaccggacccgtgtatggggaagagcaggtccccaagcccccccaccaccacaccccctaatcccgacgtgcccattaatgttgttaattgcagcggttcagtctgacccaggctgatcctgggagagggaaaatgaaggaattagcaaaaatgacaggggaaaattgcgacaattagcaggcagcattgttcctgcctgtcacccggctggttccgagctgtatcttgagggagggggtccccgtcaaccccccagccccccagtaattgttcctggagctccaggcggaggtggaggcagggaggaacagccaggagggtgtggggtactcctgggaggaggaagctcagcccagacactagggggctggggaggcgggggctgcgcgcccatgggggaggggcggggtttcgccgcctggtgttttgatggtcgggtaataacaatagtaatcacactattaataccagtcccggctctgtgctgcagcatctgcttctgccaggccccagccaggcccttctgtctgttaagtggactgaatgcgtaaccagcctggggagtcaccgctcctggcaaacccgcttgacagaggaggaaactgaggcacagagcggcagagaggctggtcccagggcacacagccagggaggggaagcgctggggcctgacaggagacctggccccttagccccataggaaaaaggcacttggggaccctcaaggtcaccaagtctctcccctggctccccactctcagcactgggttggagctccctcgggggttgtcctctgcagggtcagggtcacccaggggtcctgggtggggacaggctccgggacccccaggtctctgcctacccccagcacaaggtccagggtcctagctcctgactgtagggaggatggggcagggggcacaggtctcactttgtcttggtctcagttgccatctctgtctctctctgcatctcttttcctctgtctctccatgtctatttttttttttagtttttgtttgtttgtttgtttttgtttttatttttgtttttttgagatggagtcttgctcttgctgcccaggctggagtgcaatggcacaatctcggctcactgcaacctctgcctcccgggttcaagtgattctcctgcctcagcctccagagtagctgggactacaggtgcacaccaccacgcccggctagtttttctgtagttttagtagagacagggtttcactatgttggccaggaaggtctcgaactcctgacctcaggtgatctgcccacctcagcctctcaaagtgctgagattataggcgtgagccactgcacccggccttagtatttttatttattattattattattattgagatgcagtttcactcttgttgcccaggctggagtgcagtggtgggatctcagctcactgcaacctccacgtcccgggttcaagcaattctccctcctcagcctcccgaatagctgggaccacaggcacatgctaccacacccagctaattttttgtatttttggtagagacaaagtttcaccatgttggccaggctggtcttgaactcctggcctcaggtgatccacccacctccgcctcccaaagcactgagattacaggtgtgagccacagtgcccggcctccccattttatttactcattcatgagttggacatttgtgtgctttccaccttttgaatgatgtgaagtatgctgctatgaacacgcatgtacatgctacaacgcctgttttcaattcttttgattacatagattacatacacagaagtggatttgctaactcgtatgataattccatgttaacttattgagaaaccgtcaaattgttttccacagtggctgtacaattttacattcccaccagcaatgtatgagggttccaatttcaccacatccttaccaacacttactttctgtgttttttgttttgttttgtttttgtttttgtttgtttgttttttgagatggagtctcgctctgtcacccaggatggagtgcagtggtgtgatctcagctcactgcaagctccacctcctgggttcaagggattctcctgcctcagccgcctaagtagctgggattataggtgcacgccaccacgcccagctaatttttatatttttagtagagataagatttcaccatgttggccaggctggtctcaaactcctgaccttgtgatccacccgcctcggcctcccaaagtgctgggattacaggcatgagccacggcgcctggccactttctacttttttgatgctagccatcctagcgggtgtggagtggtgtctcatagtggttttgattttcattttcctagtgactaatgatgttgggcatcttttcatgtgcttattggccatttgtgtatcttctttggagaagtatctattcaagtcctttgcccatttttaaaaatatattttttgtagagatgggggtctcactgcattgcccaggctggtcttgatctcttgggttcaagcaatcctcccacctcagcctcccaaagtgctgagatcacaggtatgagccaccgtgcctggccctttgcctttttttttttttttttttttttttttttttgtctgagacagagtctcactctgtcgcccaggctgcaatgcaatggccctaactcagctcactgcaacctctgcctctgggttcaagcgatttatcctgcctcagcctcccgagtagctggaattataggcacccgccatcatgcccagctaatttttgtagagatggggtttcataatgttggctggtctcgaactcctgacctcaggtgatccacccaccttggcctcccagagtgttgggattacaggcgtgagccaccacactgggcccctttgcccatttttgaattgtctttttgttgttgagttgtagaatctctatctctttctattcctttatatccctctgtctctgtctttcagtctcctctctgcctccttctcatccttcaggtctgctcaaatgtcccctccttcaacagccctaactccattactctccattttgcaccacctatttcattctccatagcactggccacaaagggtaattccatatttgttagtttctttgtgtgtgtgtgttttttttttttttttttttaaacagacggagtctcactttgttgcccaggctgcagtgcagtggcgcgatcttgactcactgcaacctccgcttcccaggttcaagcgatcctcctacctagcctcctaaatagctggaattacaggcccacgccaccatgcccagctaatttttttgtgtttttagtagggacggtttcaccatgttgcccaggctggtctcaaactcctgacctcaagtgatctaccctcctcggcctcccaaagtgcttggattataggcatgagccacctcgcccagcctgttggtttcttttctttctctcttttttctttctttctttttttttttttgagatggagtctcgcactgtcatccaggctggagtgcagtggcatgatctcggctcactgcaacctctgcctcccggtttcaagcgattctcctgcctcaacctcccgagtagccaggactacaggcgcccacctccacacccggctaatttttgtattttcagtagagatggggatccaacatattggccaggctggtctcgaacccctgaccttgtgatctgcctgcctcagcctcccaaagtgctgggattacaggtgtgagccacctcgcccagcctgttggtttcttatttatttatttttatgggatccctaagcagagatgttagtttcttgcttgctgttcaactgcccctggtctgagagcccagcaggaggcaggggttgctgggctgtcctggtcaccgttgcactcccagcaatgcctagtgcaggacatagggagggtaggtattcagggagcttttgtgagtgaatgggtggatgaatgaatgagtccctctatgcaccccctggcccgtctgtctctgtgagtcagtctgtcactcactgtcccacccacctgtgtgtcccacgccccaggtctctcccccatgggtgcccagataccccaagatgtctacaagccttaggggaagagagggaggtttgtagactggctcccgggggacctgccctgggcagggtcagccagactaacaggcttcatccttccatctgccccagccccaggccgccgcggccccgcagcgctggtctccgaagtcttcgagcagcacctgggaggtcacatcttgcaggtgagtgaggccccttccctgcctgccgctccttgctaccacctagcggccgcctctggagaacagcagcctcttcagcatccatctattgtggggggtacctggactgggaaggcgaatgctcaagatccctccactccctgccccttccgaggaccactgaagccccctccccaccaaaacagtccacctcaggtggagacccaggtttcagaacctcttaccacttggcggctggacagagggacaccgggtcctctccttccccctccctgtctctcccggctctagtccctggatggctttgtgttcgccttgaaccaggaaggaaaattcctctacatctcagagacagtctccatctatctgggtctctcacaggtaagggacccccagtggacctggattggctcagccaccatctcccttgccaggcctatgcatatccttcctctctcctggtctcaccatagcagcaagaaaaatggactggatctctgtggtccccaaagtgtgttccttggcaccccacatggcacccagcatggttcatccttgaaggcagaggagggctattgttttttgtttgtttgtttgtttgtttttgagacggagtctcgctctatcacccaggctggagtgcagtggtgcgatcttcgctcagtgcaacctccacctcccgggttcaaacaattctcctgcctcagcctcctgagtagctgggactacaggcgcccaccacacccggctaactttttgtatttttagtaaagatggggtttcaccatgttagccaggatggttgagatctcctgacctcgtgatccacctgcctcggcctcccaaagtgctaggattacagtgtgagccactgtcctggctgatgagggctatttttttttttttgagttggagtttccctcttgttgcccaggctggagtgcaatggtacgatctcagctcactgcaacctctgcctcctgggttcaagcgattctcctgcctcagcctcccgagtagctgggattacagacatgcaccaccacgcctagctaactttgtattttttaaatagagacagggtttcttcatgttggtcaggcttgtcttgaactctcaatctcaggcaatccgcctgcctcagcctcccaaagtgctgggattacagcgtgagccaccgcgcccagcctgagggggctattaaagtaacaagtagatctgaggaaagcaggttcactgaaagatcagtttgccaatgactggcgggccagatgcaccatatttgccaacacttgtttcttcttaacaattttaaaggtttagaggccacccacgctggctcatgcctgtaatcccaacactttgggaggctgagccaggaggatcacctgaggccaggaattcaaaaccagcctgggcaacatagtgagacaccccaccacccccacccccaccatctctacaaaaaaacttaaaaattagccaggcatggtggcacactgttgtcccagctactcaggaggttgagatgggaggatcgcttgagcccatagggtcaaggtggcagtgagccatgatgaagccactgcactccaacatggacaacaaagtgaggctatgccttaaaaaaaaaaaaaaaaaaaaaaaaaaaaaaaaaaaaaaaaaaaaaagggccgggcgcggtggctcacgcctgtaatcccagcactttgggaggccgaggcaggcaaatcacctgaggttgggaattcaagaccagcctgaccaacatggagaaaccccgtctctctactaaaaaacaaaaaatacaaaattagccaggcgtggtggcagacacctgtaatcccagctactcgggaggctgaggcaagataatcacttgaacccaggaagtggagggtacagtgagccgagatcgtggcattgcactccagcctgggcaacaagagcaaaactccgtctcaaaaaaaaaaaaaaaaaaagggcaggaagacctactgaaagccccatccttggagccctggcatctcacagcaccttaagctttgccagtccctccaatacaaattgctatcaactttgatcatttttacaaatatttttcacaaataggaaatttaggaaattcagtgcattggcaacttgtgagtaccttttcagtgagattcctggaggaggaagacaccaaaaggaggggaatttggacaagaggacgggagggaggaagagtggaggaaaagcttggccaggtgtggtggctcacgcctgtaatcccagcactttgggaggcaaaagcaggcagatcacctgaggtcaggagttcgagaccaacctgggcaacatggcgaaacccagtctctactaaaaatacaaaattagccgggtgtgctggcagatgcctatagtcccagctactccagaggctgaggcagaagaatcacttgaacccaggaggcagaggttgcagtgagccaagattgcaccattgcactccagcctgggcaacgagagcaaaaccccatctcaaaaacaaaacaaaacaaaaaaagtccaggcgcggtggctcatgcccgtaaacccagcactttgggaggctgaggcgggcagatcacctgaggtcgggagtttgagaccagcctgaccaacatggagaaaccccgtctgtactaaaaatacaaaattagccaggtgtgttggcacatgcctgtaatcccagcttcttgggaggccgaggcgggagaattgcttgaacctgggaggcagaggtcacggtgagccgagatcgcgccattgcactccagcctgggcaacaagagcaaaactccgtctaaaaaaataaaaagaagaagaagaagaagaagaagaagaaggaaaggcttgaagctgttgaagctggcgtgggggaggatttaatgagggggcggagcccagagggataacggactgagggaagcatgtgacctccaagctgaggggcaatgggagtcatggcagccatggtggtcaggtaagtaacttgcagaggcatctttgaactgtaggtcagaagaccagtgaggacgcgggggcagaaacacagtggggagaagatgggggcctgcattgagggaggcagggagagaaggggactgctaggagagagatttacgggtagaattgaatgtaaaagtgtctgattgaaaagctctaactctttaagagcttaaaaaccactcccctgtttgtatcttgaatctcattcctgctgggacacccagtgattcatgccagggcacagttgtttgctgtatgggggtggtagtgagtaagcaggagttgggtaaacggaggttctgacacctcccacccacgccccactcccacacacagccccttaatagagtgggcggggaaaaatccttactaatcactgggtatgaagcgagaagagtctaagtttgtatcttccgtttgaaaggtaattgttttttgtttttttcttttcttaaaaaaacacactggcatgaagcgcacctgcgtgcaggcaaatgaggcaaggctgagcccagagggcgagcgagttactgcgcgcgcacctcacccgccccctgcattcccctccttcgccggcaggtggagatgacgggcagcagcgtcttcgactacattcaccctggggaccactcagaggtgctggagcaactggggctgcggacgccgacgcccggccccccaaccccgccctccgtctcctcttcctcctcctcttcctcttcgcttgcagatacccccgagatcggtaattctaagggctcctaaagaatgaagtctgagggtagatcgggggacgcccgctgtactgtatccagccatgccgcgtttatacaaatagcagtgaagttagaactgtgtagaacgaatctttgcaaaaggaatcggagtataaattgaggcggtgagacttggttccttaagcttgccaaactcccaaagattcgagctacagaaagacccccctggctgctgaaaggagttgggagaggcttaggtaaataacaaggcaggcttattgggaatatacaccggctgtgtctgtaagtgcacaatcacattacataattacgttagggccgggcgcggcggctcgcgcctgtaaccccggcacttcgggaggcccaggggggcggatcacttgagctcggttggagaccagcctgggcaacatagtgaaacctcatctctacaaaaattacaaaaaaggccaggagtggtggcacaaagctgtagccccagcactttgggaggccgaggcgggtgggtcacctaaagtcaggagtttgagaccagcctggcttgcatagtgaaaccccatctctactaaaaatacaaaaaaaaaaaaaaaattagctgggtatggtggggggtgcctgagtcccagctactcgggaggctgaggcagaaggatcacttgaacccaggagatggatgttgcagtgagcagagattgtgccactgcactccagcctgggcgagtccaagactgtctccaaaaaaaacaacaacaacaaaagaaagaaaaaaacattagctgggcatgatgacacatgccagtggtcccagctacttgggaggtgggaggatggcttgagccttggggacagaggttgcagtgaggagatcacgttgctgcactccagcccgggtgacagagccagtgtctggaaaaaaaaaaaaaaaaaggctgggtgcggtggctcacgcctgtaatcccagcactttgggaggccgaagtgggcggatcacctgaggtcgggagttcgagaccagcctggccagcatggtgaaaccccatctctactaaaaatacaaaaattagccgggcgtggtgcaggtgcctgtgatcccagatactcaggatgctgaggcaggagaatcgcttgaacctgggaggtggaggttgcactgagccgagatcaggccattgcactctgagtgagactccgtctccaaaaaaaaaaaaaaaaaaaaaaaaaaaaaattgcattagatcctaagcgcaggcccacaatgcaagaagtgttatctccattttacatcagaaaactgaggcacggcgcggagaggttaagttaattgcccccaggtcacacagctataagtgattgagttggattctagcccaggtctgtctgttccggggtcagcacgcctaacccttctctccagtggaaatttccactcccactgtgtatgggagggagggtgctgcagattaccctgccggctctttttagctctgagatgttgggggcctatgaggctaactatcctgtaaataggattttccaatcttgggtttgcttaacaccaaaaacatctgagacatcagctgtgcttgcaagcgtggggcgaagtctgcaacacgtgcaggctgttggggagtgggactgtgtttgtacctgagttttaggcacagggtcatctgtgtgtgagcatatttttaagaccgttttgtaggggttacagaaggatctggatttgtgagtcttatttattgctattccccaatcccctgttctgggccagcccctgtcctggtgacataggagtgaccatgacagctccagccccacccacctggggctcccagtccagtgaggggagaccaacctgtcctcagacagtggcaacccagatggggcagggctgggataggggaacccagaggggatggctgacccagcctgagggtcagggagggcttcttggaggaggagaagtctgtgctgagacctggaggatgggtcctgagaggtgggctttcctctcaaggcctcaggaagctatggcaggttcagagcaggggagggtggaggcacgtttgagcattagaaagacgtagatggggccaggcgcagtggctcacgcctgtaatcccagcactttgggaggccgaggcggccagatcacgaggtcaagagattgagaccatcctggccaacatggcgataccccgtctctactaaaaatacaaaaactagctgggcatgatggcgcgtgcctgtaattccagctactcaggaagctgaggcaggagaatcacttgaactggggagacggaggtcgcagtaggccgagatcgtgccactgcactctagcctggtgacagagcgagactccagctcaaaaaaaaaaaaaaaaaagacatggatgggaccagacatggtggctcacacatgtaatcgtagcaccttgggaggccaaggagggcagatcccttgaagtcaggagttcaaaaccagcctggccaacatggcaaaaccccgtctctactaaaaatacaaaaattagtcgggcatggtagcatgtgcctgtaatcccagctacttgggaggctgaggcagaagaatcacttgaacccaggaggcggaggttgcagtgagccaagattgcgccattcactccagcctggacaacagagtgatattcagtctcaaaaaaaaaaagaaaggatgcggatggctgccacataggggagcccacatactgtccccatgagctttcaaaatcatcaggcatgcctctgagtgcggccgtggcccagcggacatcttgtgtctatgtccggctggctctgcaagggtcagggtggcctgtgtgtttcctcttcaggaccccataaccttccttcactctctgtcccagaggccagcctcaccaaggtgcccccctcctccctggtccaggagcgctccttctttgtccgcatgaaatccacgctcaccaagagggggctgcacgtcaaggcctcagggtacaaggtgggtgtgagcagtcaggctcctgtattccaggcagccatgtccccagattgagggtgaccgagggaaccaggctggtggcttcactggctgcaggtggcttagggaactgggtctgggaatgggactgggggggtcacacagtgtccagtcctccagcacctgtgggggacagagggaacccagcccagtgatggtcctcttgcccccactggcccgccttgtccctcctccaaccatgcccaccaccagcaggtcatccacgtgactgggcgccttcgggcccacgccctgggccttgtggccctcgggcacacgttgcccccggcccccctggctgagctgccactccatggacacatgatcgtcttccgtctcagcctgggtctcaccatccttgcttgtgagagcaggtaccggggttgggggctgtggcgggtggattgggggcacaatggagatctgggggtacatggggagtcagagggagtgctgggtctgcaggatagggcactggggagccatgggaggcggaacagcaatggatgggacagggtgatggggagaagggagggaaggcaggggaccagggcggaggcctagcccaggggtgccttcggggatggaagaggggctgtgtcttgggtccgggccctccttctggggctgcagatcttggcccgtctctggtctttcatttctcatttctctggtctttcatctctcatccatttcctctcctgcatcccgcagtggaggcaaattaagtgctgaaatagtcccatgctctgaggtgtccagggtgcctagggccttgccactagcatccacgcgaatactcgcagctgccccgggagagacactgttttgtggtttgtttgtttgtttgttttgagatggagtctcactctgtcaggctggagtgcagtggcgcaatctcagctcactgcaacctccacctcccgggttcaagtgattctcttgcctcagcctctcaagtagctgggattataggcgtgcaccaccacaaccagctaatttttgtatttttagtagagacggggtttcaccatcttaggcaggctggtctcgaactcctgacctcaagtgatccacacgcctcagcctcccaaagtgctgggattacaggtgtgagccaccgcgcctgccaacactgttattgcacccattttacagcaagggtgtgaaccccaggggactctggagccaactctgcctctcccccaaccccgtggtcttggactcctcccctcttctctgtcaccccccagagtcagcgaccacatggacctggggccctcagagctggtgggccgcagctgctaccagtttgtccacggacaggacgccacgaggatccgccagagccacgtggactgtgagacccacctccacccaccaagcctgcctaccaccccccagacccgagcatcccactccctggtccctggaagtccttcttcagggctgcccacagtccctcctgctgcacctacagctccagggactccgtttagcattggaagagcagcaaggagactgagtgatgcctcaggatgtgtgtgtggggggggggtctggggggctgtggggtctccaaaacacccaagaggcctcgctgctgggctacctctcagtctctctgactctgcctctctgtgctttcacctttttctcttctccccaccgtctccctgcccactcccctgctctcactcctcctgtctcctcctgtctacctggctctctgtcttgcccctgtccccaccccacccccttcccatctctccctgggctgggcccagtgctggacaagggtcaggtgatgactggttactaccgttggctgcagcgtgccgggggcttcgtgtggctgcagtctgtggccacagtggctgggagcgggaagagccccggggagcaccatgtgctttgggtcagccacgtgctcaggtgagggctgtgcccacccctcctgcagggcactcagggccctgctgtctctccccacctccagtgggggtgctttggggagggcttctagaatgggacaagcccagggggtctgcagacacgaaggggaaggaggggaggatggtgagagcagaggcccagagtggaacggtcttgctggcaggagacagagaggagtcgccagggggagggggacagtatctttgaggaaggcaggggcaggctcacagcctcctcaggctcaggtggagggtctggactcttgactctggggcactggcgagccacggcaggctcttaccaggggaggcccacagagcacagcaactaatggaaagaagcagggaggggtgttccaagcagaggaagggctccaagcaacagcctgaccctaaaggtaatgccttgggctggagtagaaagcagtgagaaaccagcctgaagatgacggcctggccttttggctcaggggcactggggagtcatagaaagctttagagctggagaggatcatagtcagatctgctttttagaaagactgctctagaccggacatggtggctcatgcctgtaatcccaacaatttgggaggccaaggcaggtggtttgcctgagcccaggagctgaagaccagcctgggcaaccaagtgaggtcccatctctattaaaaaaaaatttttttaattggcccgttacagtggcacgcacctgtggtcccagctacagcagaggctgaggtgggaggatcacctgagcccaggaggtcgaggctgcagtgagccgtgatcgtgccactgctctccagcctgggcgacagagtgagaccctgtctcaaaaaaaaaaaaaaaaaaaaaaaaaaaaggaaaaaacacccttctaggccaggcacagtggctcacgcctggaatcccagcactttgggaggccgaggtgggtggatcacgaggtcaggagttgaagaccagcctggccaagacagtgaaacctcatctctactaaaaatttaaaaaaaattagctgggcatagtggtgcacgcctgtaatcccagctactcgggaggctgaagcaggagaattacttgaacccgggaggtggaggttgcagtgagccaagatcatgccactgcactccagcctgggcaacacagtgagactccatctcaaaaacaagcaagcaaacaaaaaaacccttctagctgccatgaaggaggcactgagggacaagatgggcgctggaggaccagggcagaggctggggccagtcctgggaagtgccagactctatgggggaggaggggaggagaccatcttctgcccaggtctctggctttgctgagcccggatttgggctcctgagaggaacagcaggtttgaaaggaagatgtagacatcagatgggcatgaggtgccagaggacacccaggtggtgacatccaggtggccaccggctatccaggtctggccttaggagcgagggccacgctgggctagaagtcaacccggagtttagggatctggtgttgagccttgtaagtgcctcagggtggggactccacatttccccgtgggagtgtccacacattgccacaagttgggtaaagcaggagggagtcctgagaggccaaggacccctggctcctaaccgcatccatcttctccccagccaagccgagggtggccaaactcctttggatgccttccagcttccagccagcgtggcctgtgaggaggcatccagcccggggccagagcccacaggtgagccccacctcccaccttggcccctgggaagctccaaggaacctttgggtcctggctgtccattccagaagccactagccacatgcagccatttatatacaattaaaattaaaatccaggccggtgcggtggctcacgcctgtaatcccagcactttgggaggccgaggcaggtggatcacgaggtcaagagatcaagaccaacatggtgaaaccttgtctctactaaaaatacaaaaattagctgggcgtggtggcatgcgcctgtaatcccagctacttgaaaggctgaggcaggagaatcgcttgaacccgggaggcggagattgcaccactgcactccagcctagcgacagagcgagactctgtctcaaaaaaaaaaaaaaaaaaatttaaatccaggccaggagtggtgactcaagcctgtaatcccagtactttgggaggccgaggcaggcagatcaccaggtcaggagatggagaccatcctggctaataaggtgaaaccccatctctactaaaaatacaaaaaaattagctggacatggtgccatgctcctgtaatcccaactactcgggaggctaaggcaggagaatcgcttgaacccggagggcagaggttgcagtgagccgagatcatgccactgcactccagtctaggtgacagagcaagatttaaaacaaaacaaacaaacaaaaaattagctgggcatggtggcacgtgcctgtagtcccagctactcaggaggctgaggcaggagagtcgcttctacccaggagtcagaggttgcagtgagctgagatctcaccgctgcactccagcctgggtgacagagtgagactccatctcaaaaaaataaaataaaataaaatccaggcccggtgtggtggcttatgcctgtaaacccagaactttgggaggctgaggtaagagaattgctttagcctaagagttcaagacaagcctgggcaacatagtgagaccccatctcaacaaaaaattttaaaacttagccaggtgtgatggttcacacccatagtcccagctactcgggaggctgaggtggtaggatttcttgagcccgggagttagaggctgcagtgcgctgtgacagctgtactgcactccagcctgggtgacggggtaagacctcgtctcaaacaaatttatttatttttttagggggatggagtttcactcttcttgcccaggttggagtgcaatagcacaatctcggctcactgcaacctccgcctcccgggttcaagtgattctcctgcctcagcctcccaagtagctgggattacaggcacctaccaccatgcctggctaatttagtatttttagtagagacagtgttttgccacgttggccaggctggtctcgaactcctgacctcaagtgattctcctgcctgggcctcccaaagtgctgggattacaggcatgagccaccatgccctgcaaaacaaaacaaaacaaaaaacactttaaatccatgtcctcactcacacctgccacatattgcatgcacagtggccacatgtggccagtggctgcttcgtgggacagtgtggatgtagaacatttccattaccacagaaagctctatcctggaaacttccactgaagagcacaggtctagaccagggtatcttgatctctgctctactgacattttagggccaggtgattctgtgttggaggggacactgtgggatgtttattttacagcatccctggcctctaccctctagatgccaatggtgacctccccagggctgtgacaccccaaaatatctccagatattgccaggtgtctcctggtgacagaaccagctggccgggcacagtggctcacgcctgtaatcccagcactttgggaggctgaggcaggcagatcacctgaggtcaggagtttgagaccagtctggccaacatggcgacaccccatctctacttaaaatagaaaaattagctgggtgtggtggcacacacctgtaatcccagctactggggaggctgaggcaggagaatagcttgaaccccagaggcggaggttgcagtgagctgagatggtgctggtgcactccagcctgggggacagagcaagactccgtctcacaaaaaaacaaaaaacaaaaacaaaacaaacaaacaaaaaaaaaaaccccactcccagctgagaactacaggtctggcccactaagcacagctccattccacagatgggaagactgagggctggggacacacacaggccctcagcatcttcctcttccagagccggagcctccgacggaagggaagcaggctgccccagcggagaacgaggccccccagacccagggcaaacgcatcaaagtggagcccggcccgagggaaaccaaaggctccgaggacagtggcgacgaggatccctccagccacccggccacaccgaggcccgagttcacctctgtcatccgggcaggggtcctgaagcaggatccggtgcggccatggggcctggcgcctcccggggaccccccgcccaccctcctgcacgcgggcttcctgccgccggtggtgcggggcctgtgcacacccggcaccatccgctacggccccgcggagctgggcctggtgtacccgcacctgcagaggctgggtccgggccccgcgctcccggaggccttttacccgcccctgggcctgccctacccggggcccgcgggcaccaggctgccgcggaagggggactgaggactggcagagctgccggcgccggaccctgcgacaaccggggtcccccaggacagtaggcccggctctgcccgtagccctgagaattaaacgccggctctccctgcagtggtttgggctccgggctgtgagctcctctgtccatttctgtctcccccgggtcctcacccccctctccctccacccgccctcctgcctctccagttagtccgctcctcgccgcccttcccaaggaacacgaaccaatactctgcatctggaggaggggaggtcaggtttaatgtcccagtcctcgggcgctgtccagcgcctgccaggccccacggccgtgtcgctcactcgggtggcggccgacccgcctcatcagggccttccgcggaggccgtcccgtcgtcctcgggcaccagctccacgtccagctccagctgccccatgtagaggcccacggcgcacgcccagagcaggctggcggccagcacggcgcccgcgcccacggccgcgccccccagcgtcagctgcatgggtcctcgcagcgccgccaggcccacggcgtacgaggcgctgccccacaccacgcacaggccgcccagcaggaagaagcctgcgggagaggcagggtagcaacagggccaaggtcgggggatggtctgggagcaaagccagggttgaggagacaggaacagaggcagggccgtgccaggggctagcctgcatctttgagaatcagatcggaggggaggggaccataaccatgtcctgggccacccattcagatggacctagtgcctatgggaggggtgtcttctggtgggggaagaatgggggttctatacttactactgggagtgggatggggtaggagagtctactctcaccagggcaggtgataggggctctgcattccctggttccgtggggcgagagggggggtctgcactcaccatatgctgcttcccgacccatgtcactctgcatgaaggagatgaccccgatgcccgatgccaggaggccattgcggaaccaggagaggaaggctggagggagggggacatggggggattaacatcacccccaaccctacctcctcaatcccccttacccagtcaaactgaggggcctcccttcagctcaccccatcccatccagccgcaaggcaagcccatcccaaatcctcacctcttccaggaagccgctcacctaaccatatccccccacatcctctctggcctccacctcagtgcccctctcccccaaactctgtaacactaaggattcaagggccgggtgtggtggctcacccctgtaatcccagcactttgggaggccaaggcaggcggatcatgaggtcaggagtttgagaccagcctggccaacatagtcaaaccctgtctctactaaaaatgttaaaattagcagggtgtggtagcacgtgcttgtagtcccagctactcaggaagctgagggaggagaatcacttgaatccaggaggtagaggttgcagcgagccaagatcatgccactgcactccagcctgggcgacagagtgagactccgtctcaaaaaaaataaaggattcaagatagtccctgcagaatgtggaggacaatctaggggcaaagttgcagaacctccatctgaggagtcatcttggccaaacccctccctctacgtgtacccccacggcctgcccactcacttctttctcagaactctgggacaaactgtttcctaatccaggccgctcttcagcctcgcccttcttttccttcaaatgccgccatctcctaccgagtatggcctgggccaatcccatccatgtcctaccgagtatggcctgggccaatcccacccacgtccgtccccattcacgtcctttacaaacagcccaccacaccctatatctagatgcccggtcctggcctagtgaggtgactcacacctataatcccagcactttgggaagccaaggcaggaggattctctgagcccaagagttcagaccagcctgggcaacaaagcaagaccccgtctctacataaattaaaatagttgggtgcggtggtgtatgcctgtagctccagctaagcaggaggctgaggcaagaggatagcttgagcccaggagttcaaggctgcagtgggctacgattgcgccactgcggtccagcctcggtgacagagcaagacaccgtcattaaaaaaataaaattaaaaaaaaaacaaacatggccagtccgctccattctggacctcgcctccgtcacaagccccgccctctgcagcctagatcacctccccctccaatcagcagagagctttctcccgattggttgtccccttctccaatcctgaacttccccctcttctgcggggatccacactcccgctctctgcacagtggtggcctctgcaatcgggatggacccatcttgtacccaactccacagaccctaagctctccctgaagcccctctccccacggcaggcgcgattctacgaggctgcctcgcgcaaccctaccaccccctccaatccctacggcgccccgttacccggggtcctcgtcctccccgcaagcccatcccctctgcgggcacctgcgctcttgcagtctgcgcttccgtgcgctcacactgaagcccttctcggagccgagcccgggccccgtttcctgcagaagcccccgccccatcaaggtcccacgcgagcccgggacccccgtcccatccgcaccgcccccacccctagccaccgacctgtctcgtgcgcttttcggaggagccaggcgtccgcacgatccagctcggacactgggggcggcgaagccccggcgcggggaccgtggccgggggcgaaggacccccgggcgcccccgctccggggccgctgaggcggcagtagcgacctccggaagcgaagacgggcaaggcgagcggcccgagcccaccaccagccgcctcccatgattcgcactacggccgccgcgcgccgtaccgccccaccggcctccggtaggttgcaacccatgtcactcaggatgaatggcttacccattggctatgcgctcgccactcaggtccggcgtgaactgtccattggtcggaatggcagtgattccctcctctgtcatctaggccggtagtgcccgtccctccttgattttgtaccggactacgaatcccagcgatcattgcgctcggggaaagccgatattcagaagtcgcaggcgagatgtctgctgggaattgtagttttaattctatcttttttaacggagtacatgccgagcacctattgtagttgtttcttggttgtttctctttctttctttctctttctttctttctttctttttctttctttctctttctttctttccttctttctttctttctctctttctttttccctccctccctcccttccctcccctccttccttccttccctccttccttttttttccccgccccgagaccgagtcttgctctgtcgcccaggctggagtgcagtggtgcgatctcggctcactgcaacctccacctcccgggttcaagcgattctcctgcgtcagcctcctgagtagctgggattataggcatgcgccaccacgcccagctaatttttgtatctttagtagagacagggtttcaccatgttggccaggctggtctcgaactcctgacctcaagtgatccaaccgcctcggcctccaaaagtgctgggattacaggcgtgagccaccgtgcccggccaggtctgtctctttaagacagatttgttttctttgccctaacccattccgggattcagctttgccttctctcatcagcataaaccttttcactagccaggaatgtgaaaaatgtgtctggaatattttcaatttgcacttaatcccatttaaagcttcacattcattgcaagcctgcaggctatgcagtgcagtccatttgaactccctcctcaagtgtaacccccttgctagctcccctacttttcctcttcataaaatccaagcccgggccaggcacggtggctcacatctgtaatcccaccactttgggagtctgaggcgggcagatcacgagatcaggagttcgagaccagcctgaccaacatggtgaaaccccatctctactaaaaatacaaaaattaggcatggtggcaggcacctgtaatcccagctacttgtgaggctgaggcaggagaatcgtttcatgcgcgtccatgtgaagagaccaccaaacaggctttgtgtgagcaagatggctgtttatttcacctggctgcaggcaggctgagtccgaaaagagagtcagcaaagggtggtggattatcattagttcttagaggttttgggataggcggtgaagttaagagcaatgttttgcgggcaggggtggatctcacacagtacattctcaagggtggggagaattacaaagaaccttcttaagggtgggggagattacaaagtacattgatcagttaggtggggcaggaacaaatcacaatggtggaatgtcatcagttaaggctatttttacttcttttgtggatcttcagttacttcaggccatctggatgtatacgtgcaagtcacaggtgatgcgatggcttggcttgggctcagaggcctgacatttctgccttcttttattaataagaaaaataaaacaaaatagtgttgaagtcttggggggtggtatggagagagaatgggcgatgtttctcggggctgcttcaagcaggattaggggcggcgtgcgaacctaaagtgggagagattaagctgaaggaagattttgtggtaaggggtgatattgtggggttgttagaagaaacatttgttgtgtagaagtattggtgatggcctgggtacagttttgtatgaattgaaaaactaaatggaataagagaaggagaaaaacaggtataaaaggtctaagaattgggaggacctaggacatctgattagagagtgcctaaggagattcagcatagtcctgccagcaaagattatttgtttacttcaggagttaagagtggcagtttggggatagcatgaggagatatcagctgtgatggcttggagaaacagtgtaaaccagcagtgtaaacaagagcagggcacgtatgagtagttgagaacggagaataggagtatgactagacagaaaatagtagggatgacaagtttttttggggcacagtctaagttggtccggtgtctggaatgagactggggcctaataaaaaggattgtccatacaggagctcaaataggctgtaccctgcagcattctgagaagcaaaagaggtaaaagtattgtccagtcctttttaagttggtggctgagcttggtgaggtgtgtttttaaaagacctttagtccgttctacttttcttgaagacagaggaccgtaagggatataaaggtttcactgaatactaagagcctgaaaaactgcttggctgatttgactaataaaggctggtctgttatcagactgtatagaggtgggaaggctaaactgaggaattatgtctgacagaagggaagaaatgactgcggtggccttctcagaccttgtagaaaaggcctgtacctatccagtgaaagtgtctgcctagactaagaggtattttggtttcctgactcggggcatgttgagtaaagctaatttgccagtcctgggtgggggcaaatccctgagcttgatgtgtagggaagggagggggcctgaataatccctgaggagtagtagaacagcagatggaacactgagaagtgatttccttgaggacagatttccacgatggaaaggaaatgagaggttctaagaggcgggctcatggcttgtactatagcatagcctgcctttgctggtgtgtggcgattaggcctggtggaactgccatcaataaatcaagcgtgatcagagtgaggaacaggaaagaaggaaatatggggaaatggggtgaatatcaggtggatcagagagatacagtcatgggggtcaggtgtggtatcaggaataatgtgggaggccagattgaagtccgggccaggaacaatggtaattgtgggacttaagagtgagtgcagctgaaggagccggggagcagaaagtacatgcgtcaggtatgaggaagaaaatagattttggaagttatgagaaatgtagagagtgagttgagcatagtttgtgatttttagggctctaaaagtattaaagcagcggcagccgctgcatgcagacatgagggctaggctaaaacagtaaggtcaagttgtttggacagaaaggctacagggtgcggtcctggctcttgtgtaagaattctgaccacactaaccatgcctaggaaggaaaggagttgttttgtaagggattgaggtttgggagattaattggacacgatcagcagggagagcacgtgtgtttttatgaagaattatgctgagataggtaacagatgaggatgaaatttgggcttgactgaagtaatgggggctgtctgtgaagccttgcggcagtacagcccaggtaatttgctgagcctaatgggtgtcagggtcagtccaagtgaaagcgaagagaggctgggatgacgggtgcaaaggaatagtaaagaaagcatgtttgagatccagaacagaataatgggttgtggagggaggtattgaggataggagagtatatgggtttggcaccatggggtggataggcaaaacaatttggttgataaggcacagatcctgaactaacttgtaaggcttgtctggttttaggacaggtaaaatgggggaattgtaaggagagtttataggcttaaaaggccttacccattgagcagggtaagggtgattaggttttaatgagatggtaaggggtgcatgatcggttgccaaggaaggagtagaggtatcttatacttgtgggttaaggtgggggaatacaagaggaggacgcaaaggaggctttggattgggaagaagggcagcaatgagatgtagctgtaatccaggaatagtcagggaagcagatgatttagttaaagtgtctcggcctaataagggaactgggcaggtggagataactaaaaggagtgctttaaagagtatcgtctaagttggcaccagagttggggagttttaagaggtttagaagcctggctgtcaatacccacaacagttatggaagcaagggaaacaggcccttgaaaagaaggtaatgtggagtgggtagcctctgtattgattaaggggacggacttatcttccactgtgatagttactcgaagctcggcgtctgtgatggtctacggggctttcgaggtgatcgggcagcgtcagtcttcagccgccaagccgagaaggagtcagtcggagagccttgggccagagttccaggggctctgggagtggctgccaggtgagttgaacagtccgattttcagtggggtcccacacagatgggacgcggcctaggaggaatcccaggctgcgggcattccttggcccagtggccaagatttccagcatgtgtagcaagttcctgggggaggaggttctggaggaacgcctggctgctgcggttcgggcgtttggaagttcttgcgtgctggagatgtggctggggtttgtctcacagtggaggcaaggaattgcaactttttttctgttattgtacaccttgaaggcgaggttaattaagtcctgttgtggggtttgagagccagattccaatttttggagttttatttaatgtcaggagcagattgggtaataaaatgtatattgagaataagacggccttttgaccttttagggtctagggctataaagcgtctcagggttgctgtcaaacgagccatgtactgggctggatttttatatttgaagaaaaagagcctaaacgccatctgatttgggataaagaaaaaggagcattaaccttgactatgcctttagctccagccacctttttaagaataaattgctgcgcaggtggggaagggctagtcacggaacgaaactgtaaaccataccgggtgtgaggaggggaggtgatgaaacgattatagggtggaggagcggaggctgaggaagaattgggacctagcttggcctggcgaggaggggagaggtcagttgggtctgtagaaaaggaagattagaaacactcagcaacgcttggggttgggactgaggggacaggtgggagggaaagaaggaagatttgggacgagttgcattgggcacagagactaggaagggactgtgatgtgtaaaagaatgcctggacgtcaggcacctcagaccatttgcctattttatgacaagaattatttagatcttgcaggatggaaaaattcaaagtgccattttctggctatttggaactactatcgagtttgtattggggtcaagcagcattgcagaagaaaataaggcgtttaggttttaggtcaggtgtgagttgaagaggttttaagttcttgagaagacaggctaagggagaaggaggaatggagggtggaagtttgcccatagtaaaggaggcaaacccagagaaaagagagcgtagagacacggagggaaggggttcagggttcttaccctccagaaaagcaggaagcggggtcggggcatggaaataagggattggggcacagagataagaggttggggtgcggaaataagggattgggggttcttgacccctagaaaagcgggacttgccactaagggtgaaggagaaggggttgatgggtacttgtcccttccccagaaaagcagagaaggggtagagacacagagaaggggttggggaacttgcccctcccccagaaaagcgggacttgccaccaaggatgaaggaccaaggcaggcgtccctgcgtggtctgacacctttgaaacgtgggtgaataatcagagaggcgtccttgcaatgattaaacaccaagggaaggctgccttcccagtccgtgaccggcgccagagttttgggtccacagataaaacgtgtctcctttgtctctaccagaaaacaaaaggaatagaaattaagagaagggagagattgaagtgtggcgccaagattgaaaggagaaagaggttgagagatagtgagggaggttggaaaagagtaaaaagaggccgcttaccggatttgaaattggtgagttgtttcttgggctggtctgtctgaggacctgaggtcgtaggtggatctttctcacagagcaaagagcaggaggatgggggattgatctcccaagggaggtcggtcccccgatccgagtcacggcaccaaatttcatgcgcgtccgtgtgaagagaccaccaaacaggctttgtgtgagcaacatggctgtttatttcacctggctgcaggcaggctgagtccgaaaagagagtcagcaaagggtggtggattatcattagttctgagaggttttgggataggcggtgaagttaagaacaatgttttgcgggcaggggtggatctcacacagtacattctcaagggtggggagaattacaaagaaccttcttaagggtgggggagattacaaagtacattgatcagttaggtggggcaggaagaaatcacaatggtggaatgtcatcagttaaggctatttttacttcttttgtggatcttcagttacttcaggccatctggatgtatacctgcaagtctcaggtgatgcgatggcttggcttgggctcagaggcctgacaatttgaacctgggaggctgaggttgcaatgagctgagatagtgccactgcactgcactccagactgggcgacagagtgagactccatctttttttttttttttttttttttgagacggaatttcgctctgtcgcccaggctggagtgcagtggcacagtctcggctcactgcaagctccgcctcccgggttcacgccattctcctgcctcagcctcccgagtagctgggactacaggcacccgccaccacacccagctaaattttttttgtattttcactagagatggggtttcaccgtgttagccaggatggtctcgatctcctgagctcgtgatccgcccgcctcagcctcccaaagtgctgggattacaggcgtgagccaccatgcccggccgagactgcatcttaaaaaaaaaaaaaatggccgggcgcagtggctcacgcctataatcccagcactctaggaggcctaggcgggcaaatcaccaggtcaggagatcgagaccatcctggctaacatggtgaaaccccgtctctactaaaaaatacaaaaaaaattagccgggcgtggtggtgggcgcctgtagtcccagctactcaggaggttgaggcaggagaatggcatgaacccgggaggtggagcttgcagtgagcctagttcacgccactgcactccagcctgggtgacagagtgagactctgtctcaaaaaaagaaaaaaaaaaaaacggctgggagcagtggctcacgcctgtaatcccagcactttgggaggccgaggtgggcggatcaccaggtcaggagatcgagaccatcctggctaacgcggtgaaaccccgtctctactaaaaatacaaaaaattagccgggcatggtggtgggcgcctgtagtcccagctactcgggaggctgaggcaggagaatggtgtgaacccgggaggcagagcttgcagtgagccgagatcgtgccactgcactccagcctgggcaacagtgtgagactccgtctcaaaaaaaaagaaaagaaaaaaaacaatccaagccttacttagtgaaagataaaggagctgattttaagaggggcctggcccagcaggctttgtagccaaggtccaaaggggcagtggagggctctggaacatcttcctctcattggtgggtttaagctggggagcaacattaccagatgcacatttagaggatcctcgaggctgagcacaggggcttatgcctgtaatccgagtgctttgtggggctgaggtgggaggatggcttgaggccaggaattcaagaccagcctgggcaacaaaatgaaacctcatttcgttttttgtttgttttgagacagaatcttgctctgtcgcccagactggagtgcagtggcaccatctcacctcactgcaacttctgcatcccgggtccaagcaattctcctgcctcagcctactgagtagctgggattttaggcatgtgccaacatgccaggcaattttttttttttttttttttttttttgagatggagttttgttgttgttgaccaggctggggtgcaatggtgagatctcagcttgctacaaactctgcctcccgggttcaagcgattctcctgcctcagcttccctagtagctgggactacaggcacccgccatcacacccagctaattgtttgtattttcagtagagatggggtttcactatgttggccgtggctggtcttgaactcctgacctcaagtgatccaccagcccaggcctcccaaagtgctgggattataggcatgagccaccacacatggctttaacatttttttctgatcaagagttcacagttgcccttttcttgttttttattttcattttctgtagagacggggtctccctgcgttgcctgggatagtctcaaactcctgggctcaagcgatcctcctgcctcagcctcccaaagtgctgggattataggcatgagccaccttgcctagcctagctgcccccatctgactgctgctttgactagagcaaacttgagtcaggtttatctccttccatgggcccctgaacttctagctcaccctcaagtctgagcaagcaatgaaatgtggaaggtgcctcctggttagcttatcctgagaactgcctgaccccacatagccctgtttcctgttgaatgatgcagtcggcttagtccctgtcatctgcccaaccttcccagactgcaaagcccccttaacatagaaaatgaatggctttttttgtttggttttgagatgcttgcagatttctgagactaggacattctccctaatgcaacaaactttatgaagtttctcagtatttaagtttggatatgttgttttcttttctttctttcttcttttttgagacagagtttcactcttgtggcccaggctggagtgcaatggcatgatctcggctcactgcaatctctgccaacggagcatggtggcacacacctgtaatctgagctactctagaggtttgctaatttgctagcagaattcacggaactgggcggagtgcagtgctcatgcctgtaatcccggcactttgggaggctgaggtgggcagatcacttgaggccaggagttcaagacctgccatggccaacatgctgaaaccctgtctgtactgaaaatacaaaaattagccaggtgtggtggcacatgcctgtagtcccagctacttggggggctgaggcacaagaatcgcttcatcttgggaagcggaggttgcagtgagctgagattacaccactgcactccagcctgggaagcagaaagagattcttgtctcaaaaaacaaacaaaaaggccaggcacggtggctcacgcctgcaaacacagcactttgggaggccaaggcgggcagatcacgaggtcaggaaatagagaccatcctggctaacacggtgaaaccccatctctactaaaaataaaaaaattagcctggcatggtggcacacgcctgtagtcccagctacttgggaagctgaggcaggagaattgcttgaacccgggaggcggaggttgcagtgagccaagatcacgccactgcactgcagcctgggcaacagagagagactccatctcaaaaaaaaaaaaaaagaagaagaattcattgacagctgccgtgctcccggttatggtgtattacagtgcaagaatacaggtgaaaatcagcccagggaagacgggcattcggcagagcctgggggcggggtcccatcctgaggcttccagccctcttgtccccatggaatgtggacagcgctcactttacccagcaacagtgtgtgacggtacatgtggagctttgttgaccagggaagctctcggaagcctcactgtccagaaccttcattacccctgagacgcgtaaacccagtcgtcctccgtgagactgaggtgacctcaggcgccagcccttccagaggtcagctgataccctgtgaccccagggccccaccctgagtcacattgttactagcctagttggcccaaggctgataggtaaaccaagataatcttatcaggaacgacattccagagatttagaggagatgacctcaaaggcactgaggacaaaggtcttacctctctttggggaaggttaaattcttcattacactgaaccaaacaatgcaggccgactccagaagctgaaaaaagataaagaaatgaattctcctccgagtcccctgagcaggaacacaacccagctgacattttcgttttatttatgtatttattttattttattttttacttttttttttttttttgagacagagtcttgctcagtctcccaggctggagtgcagtggttcaatctccgctcactgcaaactccgcctcctgggttcacgccattctcctgcctcagcctcccaagcagctgggactacaggcgcccgccaccacgcccagctaatttttttgtagttttttagtagagacggggtttcaccatgttagccaggatggtcgtgatctcctgacctcatgatccgcccacctcggcctcccaaagtgttggggttacaggcctgagccaccgcgcctggcctattttttacttttaattaattttttaagacagggtatcactctgtcacccaggctggagtgcagtggcttcatctcggctcactgcaacctcggctttcagggctcagcctccccagtaactgggaccacaggcatgcaccaccacacctagctaatttttgtattttctgtagagttgggggtctcaccatattgctcaggctggtcttaaactcctgggttcaagccgtacacccacctcggtcccgagagtgttgagattagaggtgtgagccactgcaccctgccgttttatttttttaatttgtatttttgtgacagggtcttactctgtcacccaagctggagtgcagtggcgcgagcatggctccctgcaacctagacctccccagctccagtgaccctcccctctcagtctctggagtagctgggactacaggagtgaaccaccatacccggctaattttttttttgtttgtttttctgacggagtctcgctttgttgccaggctggggtgcagtggcacgatctcggctcatttcaatctccgcctcccaggttcaagtgattctcctgcctcagcctcctgagtagctgggactacaggcacccaccaccacacccagctaatttttgtaattttagtagagacagggtttcaccatattggtcaggatggtctcaatctcttgaccttgtgatccgcctgcctcggcctcctaaagtgctgggattacaggtgtgagccaccatgctcggccctatttttggattttttagtagagacagtatcttgccatgttgtgcagactggtctcgaactcctgggctcaagagctcctcccaccttggcctccaaagtgctgggattacagatgtaagccacaacacctggctacatcttggtttttagacttctgatcttcagaactgtaagagaatacatttgtggccgggtgcggtggctcacacctgtaatcccagcactttgggaggctgaggtgggcagatcacccaaggtcaggagttagagatcagcctggccaacgtggtgaaaccccgtctctactaaaaatgcaaaaattagctgggcatggtggtgggtgcctataatcccagtcactagggaggctgaggtaggggaattgcttgaactcaggagatggaggttgcagtgagctgagatcatgccactgcactccagcctgggcgacagagcaagactctgtctcaaaaataaataaataaataataaataaataagtagaatacatttgtgttgttttaagccactaggtttttggtcatttgttacagtggcaacagagaatacagttatgaaacccaacaatggatatagttgtgaggatgtgagaagtctacagaggaaagtaaaaggaagaagggtggggaagggagggtgaagaaaaaacaataaaaggaaagaaaagaaagtagatggaatgatggttcagatgtaataattttatttatttttatttatttctttgagacagagtcttactctgtagtccaggctggagtgcagtggtgtgatctcagctcactgcagcctccgcctcctgggttcaagcaattctcctccctcagcctcccaagtagctgagattacaggcgactgccaccacacctggctaatttttgcatttttagtagagacagggtttcaccatattggccaggctggacttgaactcctgaccttaggtgatctgcctgcctcagaggttgcagtgagctgagatcgtgccactgcattccagcatgggctacagagtgagattccatctcaaaaaaaaaaaaaaaaaaaaaaaaaaagagagagcagggtaacagggttaattgttgtccccaaaaacatatttctacatcctaagccctggaacctgtaaatgaactaatgaactgtatttggaaacagggtctttaaaaaatatacatatataagctctcactgttgtccaggccagagtgtggtggtgtgatcacagctcacagcagccttgacctcccaggctcaagggatcctcctgcctcagcatcccaagtagctgggactacaggtgcgcccaccacacccagctaatttttcctgtattttgtagagatggggtcttcctatgttgcccaggctggccttgaacgcctggcatcaagcaatcctcctgcctttgcatcccaaattgctgagattacaggcgtgagccaccacacttggctgggaaacaggatatttaatgaaagatcttaagatgagattactcttgattacttggttgggttctaaatccagtgaagagtctttttttttatttgagatggagtcttgctctgttgcccaggctggagtgtaggggcatgatctcggctcactgcaagctccgcctcccggcttcacgccattctcctgcctcagcctcccgagtagctgggactacaggtgcctgccaccacacctggctaaatttgttttttctgtatttttagtaaagatggggtttcactgtgttagccaggatggtctggtctcgatctcctcacctcatgatccgcccacctcggcctccaaaagtgctgggattacaggcgtgagccaccgcgcccgactgagtctttctaagagacagaagacacagacacagaggagaaagctctgggaaaagatggaggcagagattgaagcgatgtcaccacaagcccaggattgtccatggccaccagaagccaggagtggaaagcaaggattctccctagagcctcagaggcagcctggccctgtggacaccttgatggtgcacttctggcctctagaacaaatttctgtcatgttaagccgcccagtctgtggagatacgtaggcagccctggggctctaataccaatggaatgccaaaatggaatttagaaaatgcaaccagccggccaggcacagtggctcacacctgtaatcccagcactttgggaggctgaggcaggtggatcacctgaggttgggagtttgagaccagcctggccaacatggcgaaactccatctctgctaaaaatacaattagctgggtgtggtggcagacacctgtagtgccagtgactcaggaggctgaggcaggagcatcacttgaactggggaggcagaggttgcagtgagccaagatagcaccactgcactccagcctggcggacagattgagaccctgccacaaaaaaagaaaagaaaaacaaaaaacaagaaaatacaggaaacagttaacacctgtagaatctgggcagtggatcagggcaggtactcaaagagcacctggcaccagttgttggtcccagtgtccaggtaaccctgggctgtggaaagctcgaccacatcctggtgctggtggccatctctgccctccctcagcctccataccttcctccaatggagatgttcctcaggctccacgcacttcctgagcgacatggtccactcttgcagctctattttttttttttttttcaagacggcatcttgctctgtcacccaggctggagtgcagtggcactgtctctgcctcctgggttccagtgattctcctgcctcagcctccagagtagctgggattacaggcgcccacaaccacacctggctaatttttgtatttagtagagacggggcttcaccatgttgaccaggttggtctcaaattcctgacctcatgatccgcccacctcagcctcccaaagtgctgggattacaggcacccgccagcacacccggctaatttttgtattttagtagagatgggggtttcaccatgttggccaggatggtctcgaactcctgacctcatgatttgcccacctcagcgttccagagtgctgggattacaggcatgagccaccgcgcccggccaactgcatgcgtttttaaagctgttgcagttcttctgcccatcctgctgctgagggactccctcccctttatgtaaactccaagaaaaccctctatcttgtttgctgggtttgggtctcagccttttttattttttttaagagacaggggtctcactctgttgcctggcctgctggagtgcaggaaagtgatgtagctcactgcagcctgaactactgggttcaagcgatcctcctgcctcagcctcccgaagtgctgggatgagaggcgtgagccactgcgcccaaactgtattgatcatgcattcagccatctatccacccatccttcatatttgttgatgcatttcaaagtaagttccaacatcacaacagacccctcctcagaggatacccctggctatcacatgggtagggtgcctgctaaagctcgtcccgtccctggaagccagcccagctgtcctgtctgtgttaatggtctttctatgagcactgcaggggcagatccaggactgtgcaggtcacccctggatcccaaatgctgagcgtggcccgcacagaagctcagggaccttgggatgttgctagtaggtgatctactgccatccactgaggacagctgacactgtttggaggcacaaattgtccctcagtgtcctcatgttaccctgaggccgaccgctgagagaataggtccttgtttcaccccccagccaccttccaccctcgttaattcccagggcaagggatggtctggggcagcctggagagaccagacccacaagctttttaaaataactgcatcctttaatggcagtaatacaattactggattaagagaccacaggagaaaggcaggtgacgtttctggaagacagatatggagtataaaaagggtgtgaaatagtcatgcggcgatcattgtaaaaatacagttcattatatacatatttgcaccaccaactctcaactctgaaacagtatttacacttttgttacaatcctggttagagaacaatttttctttaaaagctcggcctgatggcaaatgagaatttcgggtgaattcatagtcctatgaggttcttaggctgaatattccaagaggagggctccagcttctatttcatccacagatttcggtttaaaaaatatttttcttttacaaaagaaaattctcaaaaggagaggaaaaacaacaacaaaaaccacaacactgccacactgtgtattcatacttattttacaaacaccaagggctgtgccctctgcttcaaggccaacactggtggctgaagacaaatctcattaatgattgtgtaaaaaaaaaaaaaaaaaaaaagacaaaaagacaaaccaaccaaccagatcccagcactgacccctcagggctgtgcagccctgtaggacaccctgcctcctggctccaaactatgagtttttcatttttctctttttggggtggggtgggataggagccttgttcaccccaccctgaggaggagggaaggggaatcccttggcaggtaactaggtctcttcatggtcagcaatgaagagcttggcctgcagccacatggtgggccagggagacgggcagatgcagccacaagcacacacttcctgaggcccctcaagtggcccagaggcaggatagcaggcctcccccagcaccccttgcgcccatctctcgggctgtgtccataggtgggcctcctccagggctctgcagatgaggctggccctcagccagggtgggagcatggggggagcagaggctccccatcccctggctgcagggttcccactcagtccgtttcttaagtgtccacaaatcccacagagcaacacaccttggaacacctgcatctgctggcttgggaaaggaaacccgaacacatcaatacctcatgccctgcaggtcacacagtgtaaggaggtgcgaggaaaacagagaacacttggccaggagccaccccagggtccccattgttggggcctggcggcgcagccactgcacggatcctggagctgtccggggctgggctgcagtgcaggcatagcgggtgcgtggcttgaggaccaggacagaccctggtgtgggcaagcagggtgtggcccacctgataggacaggtggggtaatactgacagaacgtgcgtgctcctaggggctgcctcctagaggtggctcttcaggactctgccccacaccggcccccactacctttgggtccagttctcactgtggaggcttctgctgcaggctggggggcatccgcttgctctagacggagggtggcagggagggcacgtgtggtaatccagggacaggagcaggcatgcgccagggagcccccatagtgccgctgggggctttttccttaataccttttcactctcactgtctcctgagtgggttgttacagcctgcactgaaaagacagtgatggtgcaccctagggttctagaaacgcctggacctgcttccacgcaggccctgccatggtcttggttccgggtctcttcgggcacagggtgaggagcgttcaataccttcccagacaccaactgttccctttgtcctggggaaaaggggccatgctttgcccagaaaacccactgggcctccagcaaggcccggccacgcagagcccacagagtctgaggccaggcactggcgaaagttcacaggtttgcgggcatgagtcggtttgctcagcaggagcccctgagcccgccacactgaccagaacttaagatggttatatacaatttacaaatctcaaagaaagtactactttaaaaaaaaataaaagagacggaaagcaaaagaaaaagaaaagaaaaaaggaacacccagcctgcctccccttgcccccaagttccctaccctgggtgctgccctgaatgccaccctaggaagggtggctggagccgcagctctggctggacactactggcaaaagggggaggccgtggggtcgaagcctttaaaaacatccttcagggatgccgcatcctgctcaccctcgcgggccggactgttcccagcaaatgggcttcctgagcccgtcttgggtgtctgcttcaccgtcccgaagagggtgggcacgggcaggttgtgcaccccgggctggggtggggcaccctcggggggtggggtggcggtggtggcagcgggggctgcagcagccttgggccggggccggttgtagctgttgtatctgtccgtgggggtgcccccatcagcaccggccttccctgtctctggctgttccagggcagacttgcggacgaacgggggctccttagccttggaggccgagctcttgccattgccctcagcacccttgggctgggcacccgtgtcagcagccggctctgtggctttgccccccgcgttgggagtcctcgggtcgtagaggctgataccgctcagcacactgctctgcccgccccctccgccctggcccagtccaccggccgccagcacgcgggggtcgtagggagcggtggctggtggggaggcatccccactcgggctggcggtgggagagggcgcctcagcagggccgggcttggcagcccgggaggaggccgtagagtctgtgggtttctgcagccgagggtcggtgggggccttccgcacccgggggtcactgggtttgtcgctggaaccgggggcggccgaggagccggtggcattgactgtcttgaggatgcgagacagaagttcaaagtcggggaggttggcgccctgtgtgctggaatccgtggaggcgcccgggcgctgccgggcgttggggggccctgccgtggcagcgcggtgcagccgggggtccagggtgggcatggattgcagggccgcgggcacggggggcactgcgtcctgcttggggatgggtagggggatcaggtcctcgggattccagagcacggtgcgggcgaagctgggcttgctcagggtcacgtccttcttgatgtggctgaactgctgcagctgtgaccgtgggtcccgcagagggtgcccggggagtgggtccaggggaatgttcacggccttctcccgcagggcccgctccccttcctcctcctccgttgggggcggcccagaccccttggaactgctggggcccacagggctggaatgaaggctgccttcgggcttggaggtgggcagggcgcgagccagccgaggatcggagggtcccgaatcacctgggccagacccgccagaagcctccacatggcgggtgagtctggggtcccggctgaggcgagggtcagccagccggcttcctgtggggtgtcccttctggaggcgggggtcccccagcccactgctgctcagctccccaactgaagccgggggtcggctggacgtctgctgcctcaaggtcttcaggatggaggtgacactgcttccaccctcatcctcatcacttgagtaccagtttccggtgtcacctgggaaagaacagaggagcagggaggggtgagtgggcgcatccaccacccgccctcttggatcccacagcagcccaccgtgagcagctcctttgcttgtgcctctcagaacctcaggtcctcctctctaaggctccctccccacagtgggcggctgaggagacccagagagctaaggcgctcggtttatgccatgctccccagctctcctcagtggcggcactgcactaagtagtttgttttatttaaataactcacaaccaccccaggaggtagtgatactatcatgcccatttgacagatgtgaaaacagaagcacagtgccgttacattggagtcagggccaggatcgggctaggactcctaacccagagctctgctgtttcctcccgcccacctccgggctggttcagcccccactgtggcaagtccagctgtgggcacctctttctggaggtcctggtagcagacaccattgactcagttctggctgggcctggggctcagagacacttgaccccaaaccggctcgtgatgtccccatgtcccagggaggggctggtgtggaccaaccgcagtcaccagctgataagaggcagggccggctgggcagactcagacatgggctcaagcaaaacctaggccagtacagcctgggccatcaggggagcggcccctcctcctgctgtcccactggctcctgcgctacagtcagggccacctgtggcctctggcttcaggatctagacaccacttgtcattttaccccaaagtggacaccactaagtcaaccatgcagcaactgagactcggtggctcgtgactatgattattactggttaatttcaatgactagctcttgtttgttggctccttgagaacacggtaggaaaacaggggctgtgagggtctccctaaagcctcctctggcagggcacaggcggtcaatcctgttggccactgtctcctccaggaactagccctccatcctactccatgggatcagggtctctcctgaacccaacacagaaagccacccctgactgccagttttctcagggacatgcagcagccccagcccggcttcatggccctggacaggggtcctccctagccatgggctccttcctgacaggaaacccaacctggaacaccccaccaccgccgctcccctgcacagcggcctggggcctgtgccccggcccctggggcggacacgtgccttcctcattctcccggtcctgcttgctgctctcagccagcctcctcgctctctcctcctcctcctgctgcttctgctggatcctcaggtacagggccctctgggctgagggcaggaagtcagggacaccggcgcctggcttcggccggcctgggggccctccctcagagaagctgtcgggctccagagggtgctcagggaagaggtgctccccaggctcccctggcagctcttcgtagtgcccgtagtcctctgtggcagggaagaaccgagggttcatgtcgggaagggcctccaggtgccaactccagcccccctgcccctcactgcaaacccacaccgatggcgatggagaaggacgcacagcctgcccctgcctgccctccccaggtctcaggggaacagagcggcccatgggtagccccgcctacatgaagaatgaggttcacagagagggttgagtgatgcgggcaaacgcttatgaggtggaaacaggatggaacattggatgtacgtttgtaagacgcaaggagaaagctttgaaaagacacacagaaacagtccctctggaacacagattctggagaggccagggatttctgtactctttcctgtacttttaaattattttggatggataggagttgcacggtttctttctaacaatcagtaaggaaacaccatgcatctcatagtgaactcgaccatgttcaacactaaaagccaggaaaagagaatgaaacgggtcaagtgctgctctggccacaggtcaacagcagttccagagtgcctccctgcccactccacagcattagggggtgtctcaggaagcacggggcctccacctcctgcagcgtgggcactggcaccagccacctcaccccacacactcccccagtgcctgagccaagagctgtgggcagcagcacaggctgacgtggggacgcagcaggcgtagaggggagggcaggctcggcgacgcctcctgcatgttgcgtgtgtgacacatgtgagcatgggagacatcgaatcaccgaaacggaggggggggcgtctggagtcagtgctgccccacagaacgctctgcagtgatggaaatgttctagatctgcagggcaacatgtggccgcctagatcctcctggggcagctgagcatttaaaacgtggtgtctagaaaagtgcacttgtaacttagcttacattaatttcaacttcgtcaagtgaacctgatgggccagcctgctctatgacacatcccagcgcagagctgggacccactccatgaaccagacagccgagggtcccccttcacacacagtctgtgcacacaccagaaaccaatgaccatacatgttagagggaggattttatgaaatgggattattctagagacacctactgctaccaacgtgacggacttctggtgccccgccagcagagcttttcccgtgcaccttttagacgcatttgttgaagggggaggagctgagaaccccagcacctactgtggcagcctgtttttctcgtctttctttctaaagcacccactctcacccaagtacctgctctcccaggtccatgcaccacctaaagccaaagcccacgttcacattttgatctctagcctgggcctctcccaatgccccttaaaccaccccctcaaaatttccacatggccgtcggaggggcaggcaccctagagtgactatgccgcacgtccagcgccccatcctcaatgccgctcctgcccaccttgcaaaacaaacacggggctcccactgccccacggcaccgtgtccaaacctcgaagccctgccttgcactccagtggccgccctgctgcctctgcccagggacagcccccagcagctgccacagcagctcccccagttcaacacagcgcccccacccgctgccctcggaggtcccatcattcctcacgttgtgagtgccgcttcacttctcaaagagacttttgtgactatccccactgaggcactgagccttctggcccaccgccacggttccccaccttttcttctaagaatggccaatgctgaaaggagccaactcctctatctacacgcttgccacctgcttgtttccaccaagatgcaactgagcgaggacagtggtggcctctcgtgcctggccctcctccagagggctgcacaccacatctcctatggctgcagcagcgtcatctaaacccctctgctcactggacatttgttaccaatgcaaaaggaaaaaaaggcaggaaaacggccggtaatgggcacagaacccgcagagtcctggggtggacactggttgctccaagccgagaactgcccggaaagagatggttttggccaggccactaactgagtcctgatgggcccaccagcctctcagcctcacacccttgcacactcgtccctctaacttcccatgcttccgattccaggcacagcttgcaaaattaaaaagaaataacctatattggtaatacacagaatactcctttcttcttcaacagaatacatcctatgtcactgaaaacattcaaccattaaatgggacagagatggagtcatgctttcaaagagacttggacgaaggaagaaaaatcacatctccccaactctgctccactgggtaaagcctgcagccccaggcagccacacctggagtcccgcatacctgcatcccccaggagtccgggctccatctccatgccctcctgctgctggtagaagttttcatagaagttctgggctggcgggatagggggcatcattccagaatgtggggagtctccagggccgtagggcatcattggagggccgccagggcccatgggtgggccaggattcatgccagggcccatcggcatgtctgcgtgcatgtctgcgtgcatgtcagggtgcatgtccgggtgcatgtcggggtgcatgtcaggatgcattggaccgcccattggccctgggggtcccatgttgggcccagggcccattggccctgggggtccaccgggtccagggaacctagaagagggaaaaggtgcctgtgacggaagctgccgaggagggcagtggccacaccccagaggagaggcggagggctgcagagccgaaggtcatgggccccagaccaggactcccacagctggggagagaggcaggactctcccacagccaggcttgccctaacaagaggagcctggctgggcccaggacagcgcccactgcctgtcacgggggtccagggcactcacctcacacccagcttctcagccagctgtcccgtgggccgcaccacgatctcaaacaaggaggggatcttcttgttgtacatgtcctgctgctgcagctgctgcggggacagtggctcatgcaccggcatgggcatctgagggggcccgggcggtgggggagggggagggggcgggggcggggggccaccctgcatgggcctgccgttgggagaggttggagcctgcgggccagggggccgaggaggggtgggcaggaggcccacaccagggggcggtttgggcagggggttgatgccctgcttcttcagttcctccacctccttctcatcctcggcacctgcttctgcatcatcggccaacatctgcgggtgtgaaagaacaaaagaaggtgtggacggggtcaggatggaaacggacctctccaggtctgagagctgaagtttatgaggaaaagtccataatacaaggaccttgagatctaaaggcataaagaccacaatggctctgtaacaaaaatcatcatcagccacctctctgctccactctcggggaccagctggtagagggggggccattcctgctctatggcaaaatacacataacaaagcatactgtttaaccatttaaagtgaacgattcagctgggcgcagggactcacatctgtaatcccagcactttgggaggccgaggtgggtggatcacttgaggccaggagttcaagaccagtctggccaacatggcaaaaccccatctctactaaaaatacaaaaattagccaggcatggtagtgcacgcctgtagtctcagctactcgggaggctgaagcaggagaatcacttgaacatgggaggcagaagctgcagtgagccaagatcgcaccactgcaccccagcatggacaacagaggagactctgtctcaaaaataaataaataatgccagacgtggtggctcatgcttgtaatcccagcactttggcaggctgaggtgggcagatcacctgaggtcaggagtttgaggccagcctggccaacatggtgaaaccccatctctactaaaaatacaaaaaaaatagccgggcatggtggtgggcacctgtaatcccagctactcaggaggctgaggcagaagaatcgcttgaacctgggaggcggaggttccagtgagccgagatcacactactgcactccagcctgagcgacagagccagactccatctcaaaaaacaaaaacaaaacaaagtgaacgatgcagtggcatttggcacattaacaatgttatgtaaccgccacctctatatagttccagcacattttcatcacccccaaaagagaccctgtacacactaagcaatcgctccccaccctctacccccagcccccggcagccactctgctttccgtctctgcggacctgcccctgctggacagctcctgcgaacagactcatgcgctgtgtgcgatgggcgctttcacttagcaaagtgcatctatctacaacactgctacatctatcagtatgtcactctgttttttatggctgaatcatattcccctgtcatgtttggattttaagggcctctgatctcaactcctgaccatgacccttagggcctaagagcaggggtgggtgtctgggtgtctaggtatctggggacgactgggtagcttcctggcagcttcatttcctcccacgatcccgactcctccaccccaaccacccagcctcgtttcagtgcaatgagcagccaagctctcccctacagggccaggaccagcttcccccaggtttttatttttcctgttattcccatgtggctcaacgtcactcaactgttgaggtccctcattagatgtcaattcatagtgtctgtccagtctcctgtattcactactgggtcaccaggagttctctgccaacactgcctatgccttgtcggattattcagtcattcccatgttcatcctggctcaacctccccatcaactccaagagggcaggactgtttcttccctgctatatccccagggcccccacgagacctgatacagggcagacgcccagtgagtgaatgagaaatgtcaaaatctcaactggactagaatgtctcatcagttaggatagcgtgcagaaaagtgacacaggaggcctggctgctctccttggaaggcctgcttgcaaggctaggcctcggctggtgtctgggaagctgcattttgggagggctcccagcattcactgtccagtaagaggggctcactgcatctaaactgtttctgcaaccaatgcagtttgtgctgaatgcctgctttgccccccaaatctggaattttggtccatgctgggcagaggctgcctaggtgagcagcctagtgaaaaccctgggcgctgagcaagtctcctcgcagacagcatgccactcgtgctgtcacaactggaggagggcagcgtggcccctgcgagtccacaggaagaggatgcgcctgcttcctccaggcgccctcatgtactcattcccagggctgagtttgcctgtgtcccttcaccgcagttaacatcttggccgtgagtcccccagcaagttgctctgggtcatcttggggaccccagcacagatcccttagttggtcctaacacagggtcatcaagataaactagtcctgcccctctgcccaggaacagcaaggcggacagaaacaggaccccctggtgggggttgtgcattcgcagttttcccttctcctagccattagcaatggtatctggaccctggaaccccagggtccaataagaatgtggcttcatggaggaggtgtggaaaacgacgcggtggaacccctctgtccttctgaaccctgatattccaggggtggtcagcgtgtgaaccagcagcacagggggacccgtggaggcagaacccgcattctgccctttgagcgtgggcaccaccacctgagatgagccttgctgggagggcccagagccttgcgccagctgctttcaacactgccacgggctcacttcctcctggcccaagggcccttcctcaactgtgtgtggggccatggcttgcgctgcagctgccaccctgcatctccctcctcctcctcctcttcagtccccactgccgcacatcctggggccgccagtgtcacctcctcacaaagcctcttgaatgtctgcctcctgaatagagcccagctagagtcctgggctcccacacttattcttcacggcctgatccccacgtgtgtgtgcgcacacacacatacacacacacactcacactccccatgtgtcatcagcatccgcccaaggacctaaccctgcctcctcagcacccccagtgcctggcacaaacaaggcacagagatttattgagtgaacgactaagcaaggaacacaaaccaatgcattccctggaatccagaggctgggtccagtgcagaggagaaaggagctcaggccctgaatggttgactccaccatggagtcaactgcggagtcaacccaaactgcccatcggtcctgccagcacagaccctgtggagggcacctctgtccctggcccctccaccagcaaagacaccagctgagacaactagcaccccgctaggtgccaaaacctctctagccaggacagactatcagtgatcacagtttccaacagtcagtcaccttctgcaagcaataagtaacacttgtagaggtgcagaggcatgtgggctgagccccattaggccatgtgaataagctccaggccactggtcaccaacgctgttgcctcgaactggaaacaactcaaatgtccttcaacggatgactggataaacaaacacagatcatccgctcagtgggacactacacagcaacaaatggtaatgaactgttacttgcaacaacgggtgaacctcaaaggcttcatgccaagtgcaagaagccagactcaacacatgcacgcgtgcgcgcgcgcgcacacacacacacacacacactcacactcttaaagcctgtttaccccataattctatttatatgatttgcttgaaaaagcaaaaccaaaagacagaccctgatccacggttgccaggcactggagatgtggggtggcatttactataaaggacacagcagagtttctggggtgatggaatgggtttcctagatccatcttgtggggtggtgacatgactcaatgtgtttgtcaaaactcatagaaccaggccaagcgcagtggctcacgcctgtaatcccagcactttgggaggacgaggtaggtggattacgaggtcaggagttcaagaccagcctgaccaagatggtgaaaccttatctctactaaaaatacaaaaatattagctggccgggcgcagtggctcacacctgtaatcccagcactttggaaggcagagccgagcagatcacgaggtcaggagttcgagaccagcctgatcaacatggtgaaaccctgtctctactaaatatataaaaattagccgggcgtggtggcacacacctgtaatcccagctactcaggaggctgaggcaggagaatcgcttgaacctgggaggcggaaactacagtgagccaaggttgcaccactgcactccagcctgggtgacagagcaagactccgtctcaaaaaaaaattttttcaaaaaaacattagctggatgtggtggcgggcctctgtaatcccagctactcaagaggcagagaactgcttgaacctgggaggcggaggttgcagtgagccaacactgcactactgcactccagcctggacgacagagcgagattccgtcttggaaaaaaaaaacaactcacagaactatatatcaggtgcggtggttcatgcctgtaatcccagcactttgggaggcctgcgggtggatcacctgaggtcaggtgttcgagaccagcctggctaacatggtgaaaccctgtctctactaaaaatacaaaaattagccaggcgtgtgtcaggcacctgtaatcccatctattcaggaggctgagacaggagaatcacttgaacccaggaggcggaggttgcagtgagccgagatcgcatcattgcactccagccttggcaacaagagtgaaactccgtcttaaaaaaaaaaaaaaactggtaccaaagaggacacacaaaaacatagataaaatgctaagaactgcttaaagcactcagataaatttagaaggtatggattctcagctaggcatggtggctcacgcccgttatcccagcactgtgggaggccaaggcgggcgtggatcacctgaggttgggagttcgagaccagcctgacaaacgtggagaaaccccgtccctactaaaaacacaaaaaatgagccgggcgtgatggcacatgcctgtaatctcagctactcaggaggctgaggcaggagaatcgcttgaacctgggaggcggaggtcgtggtgagccaagatcgcgccactgtgctccagcctgggcaacaagagcaaaactccgtctcaaacaaaaaaaaaaaaaaaaaagaaggtatggattttcaggaaaaaggtctgtgtgcatactccaaagcagaaatctacaaccctctaagttttgcaaacatcaagttttgctttcagaaaatattgctctctacagaatttacttttaacggactcaagtaccattatacttaatctctgttggcttcacaggtgcccacttccatgaagccaagggagatcaaatataatcccaatgccacttaaaaaattttttttccagccgttgaaactacatacaaaaagcccccctaaactatctctatttttttcattattttttattatttcctaaaattatgtttggcgataaatgagatatattgttaaaattaatttcacgaggtaggtggcttatttcaggtcaggagtttgaaaccagcctggccaacatgataaaacctcatctctactaaaaatacaaaaattagccaggcacggacgggcatggtggctcacacctgtaatcccggcactttgggaggccaaggcaggagaatcgcttgaacccaggaggcggaggttgcagtgagccgagaccacgcccactgcactccagcctggcaacagagcgagactccgtttcaaaaaaaacaaaaaattagccaggcgcattggtgcacacctgtaaccccagcactttgggaggccggggcgggtggatcacctgtcgaggtgggtggatcaggaattcgagaccagcctggccaacatggtgaaaccctgtctctactaagaatacaaaactaatcacgaatttgagaccagcctggccaacagggtgaaaccctgtctctactaaaaatacaaaactcagctgggcatggtggctggcacctgtaatcccagctactcaggaggctgaaacaggaaatcacttgaacctggaaggcagaggttgcagtgagccgagatggtgccattgcacttcagcctgggcgaaagagtgaaactccgtctcaaaaacaaacaaacaaaaattagccgggtgtggtggtgggcgcctgtaatcccagctactgtggaggctgaggcaggagaatcgcttgaacccagaaggcgaaggttgcggtgagcagagatcgcgccattgcactccagcctggacaacaaagcaagactccatttcatttccatttttttttttttgagacagagtctcgctcttgttgcccaggctggagtgcaatggcacgatctcagctcaccgcaaccaccgcctcccgggttcaagcgattctcctgcctcagcctctcgagtagctgggattacaggtatgcaccaccttgcctggctaattctgtatttttagtagagatggggtttctccatgttggtcaggctggtcttgaattcccaacctcaggtgatccgtctgcctcggcatcccacagtgggggggttacaggagtgagccactgcgcctggccagacgccacttcaaaaaagaaaaaaaaagtaatttcacctgtttctttttacttttttttttttttttaatgtggctactggaaaattttaaatgaatgatgtgattctgtggtgctcctgtgggcagcactggcctgaagcacaaacctggagcctccagcagggggcagtcctcagtcagagatcagtgagtcctcccaaggagccgtgaggcctgactggccactgcttcccctgtcaaacagctcagaccctaggtatgtactgattacataaccctggggcatgccaggcgctgtggctcacacttgtaatcccagcgatttgggaggccaaggtgggcggatcacaaggtcagtagttcgagaccaacctggccaacatggtgaaaccccgtctctactgaaaatagctgggcgcagcggcatgcgcctgtagtcccagctactcgggaggctgaggcaggacaaacgcttgaacccaggaggtagaggttgcagggagccgagattgtgccactgcactccagcctgggtgacagagtgagactctgtatcaaaaaacaaacaaaacaaaaaaaccctagggcagcaggctccccggagggacttgccttttcctacaggcgccctgccaacgaggaatggacattctcctacgtctgcttgcatggggcttcccctgcacccctcacaggggtgcccctgccaccagttaacaagacagtcactgacagatggactctggaagccggcagatgtgctgatgccttgatcctttccactgtcaaaaaaaatagccaatctcctagaacctccttgtgaactagaaggcaggaaagcttcatttgaaagggcaccagttcccgtacccactcactccccagatgaatcaggaaactcaggactgatgtttgggtatttaaccctaacccaaggtcctcagcctgactcctcagggaggacaactgatgccaggatgagtttcaaatgtcacctggctagtggggaagccctgacacctcccccaagggagccttcccctttagagacccccaacttccctctattttctctaatgcataatgggggccctgagagttgcaaagaaacgtttgacttttccaccaaaatacaatccttgcctcgtctttgtgtatctttggttttttgtggtctttcttggagatggcgtcttgctctgttacccaggctggagtgcagtggcatgatcatggctcactgcagcctcaatctcctggactcaacagatcctcccacctcagcctctcgagtagctgggaccataggcatgtgccacaatacctggctaattttttttttttttttgagacacagtctcactctgttgcacaggctggatggaatgcagtggtgtgatctcagctcactgcaacctctgcctcctaagtagctgggactacacgcatgtgccaccacaactagctaatttttatatttttagtagcaatgaggttttgccatgttggccaggcaggtcttgagaacctggcctcaggtgatctgcccgcctcagactcccacagtgctgagattacaagcgtgagccaccacactcggttaagttttttgtattttttttttaagagacggggttttgccatgttgccctaagtacaactgatctgcctgccttggcctcccaaagtgctgggattacaggcataaaccactgcacccagcccagccaattttttttaatttatttttagtagaaacaacgtcttgctacatgcctaggctggtcttgaactcctgagctcaactgatcctcctgcctcggcctcccaaagtgctggggttacaggtgattcgtgtatctttgtgtattgtgagctctctctaaatgacacctaagagatcacgattcatgcttggaggcccatcaggcagcattcctttcatttggtcatgccccaggggaaacagcaaaagcttgtcctggcctaagacaacacatgtgaccacctcaactccttgcagaagaggacacagtgcccgtgtcctccttagaatggcccaattccagatcaaccaaactgggcactgcagaggctggacaggcaggccacagcactgaggcaatggagtgcgcatgtcccagttcctgtagccgggggccccgttacccccggacattaccttatccaagagctccctcgtctcttcggtcagagggtcgtgggaaaacatgcagtcgtcaccattgatgcagttcccagtggtgtggtacagcttacacgggaaatcacgttcatggcaaattaaggtaaatgcttcatctcacagaacgcccccctcccccaccacagacccaaggcagaatccagctccctttgttttggagataagaaatctgagcccagagaggtgaggcgatgtgctaagggctgctcagtgggttggcaggaaatccacggagagaccccggcactccagactgcagggcacttccagccccactacactggctgggggctgcgtcctcagatggtcaaccagactagggaagttaaatgactcacccaaggtataaaaccacctggaagaatctcagccaatggtatgggccagtcttgagagcctatgtaaacagaacatgctccatgtgcatctcagtttactccctggaaggatgggaaagacagacccctctgagggcggacgtgagtgttaaatgagatggagactcacagaaagctcttggcacagagagaaagcacagagaaggaagattggctgttactaccaccatcaaggagcagagaagttctgcgccctcattcagaccagatgctggcactaaaggatatcgtgcatataagggcagttctcagctctggcgcaaaatccagtgatgtaaaacttgcacagttctcgcttctttgggagttcgatgtcatggctaaaattacagtggtctccctagaagagaagcaacaaaaacataaggtggtggcgtgggaagctcttgcttacttctgtctgcaaagggaagaaatactgtcactgctggtgcatggaggggccaatgacagaaacgaatcccccttaggaaaggaagacaggtgtaggaagggcaggtcccaaaggctgttgggactaattttttaaatatttttttgtagagacaggtctcactatgttgcccaggctggtctcaaactcctgggttcaagtgatcctcccactttggcctcccaaagcgctgggattatagccatgagccaccaagcctgggtacttcctgaatttaaagaaaagccttttgtccatttttcttcctcccagaccttggatgtgatgctcggaggcacagcaaccaccgtgtaaccatgaggacaaaagccatatgtttaaagatggcagaatagtaagcaggaatgagcctaggtcccccagggtacccctgaccactgcgctgccagctactgcccacccagctccagactcctggttctgagagacaaatgtctatgtgttgaagccaattttgttaagttttcctttatttccggttgaacacagtctcaacgacacaatacctaggtgaaatccaggattgtgttctccattcttcatcattcagtcctcaggaatcactcaccataaccgtgaactgaagacagaagctgatctgtcccccttttacgaatgcctattcatttgtcttaatttatttacttatttttgagacagagtctggctctgtcgcccaggctggagtgcaatggcacgatcttgactcactgcaacctccaccacccaggttcaagcgattctcctgcctcagcgtcccaagtagctgggaggctgaggaaggagaatggcatgaatccaggaggcagagcttgcagtgaggcagaacttgcagtgaggcgagatcacaccactgcactccagcctgggcgacagagagagactcggtctaaaaaaaattaaaaaaaaaaaaagagagagagagagagagagatggggtctatgttgcccagggtgtattcatttgttcttgcttatatgtatttcaagtttctcaacagaatagaaattgtaactaaataagaaatactgcccgggcacggtagctcacatttgtaatcccagcacttcaggaggctggaatcaggagtttgggaccagcctggccaacatggcgaaaccctgtctctactaaaaatacaaaaattagccgggtgtggtggcgggcaggcacctatagtctcagctactcaggaggctgaggcaggagaatcgcttgatcccaggaggcggaggttgcagtgagccgagatcacgccactgcactccagcctgggtgacagtgagacttggtctcaaaggaaaaaacaaattattttatacacaacattatttgtttgaagcatctatttcttcccaagacagatgcaggggtgcagtgtgccctgagcacacatctgctggtgtctgttgctgcctgggatactggggtaagaagctgccggctgaactaatactgggttattatacttgtttccttcagaactctgtggtcattggtccatcttctgacattgaactctgctatgaagtccaaggttaacctcatcctcccctcctcttctgtttggatgctttaatcattccccattcaaccctgaagctcaataacttcaccaggatatgctgctgctttgcattcacatcaacctccataattacgtttcaggctatatggattggttgaaaattttggccaaaaaattcccctaaaaccaaaagtcctcatcttactgggggtcctcctcactctgaaaggtaacctgagtctttcaggccgcccaggcaactcccagtatcggcaagtgtccacaaggacaaggactacacagtcactcccacccaccctcaccacggctccagaaccttctggaagccatgtgtcctctgggggctatggcctcctagaggtgcccagctttcagcgctccttacccaggtgcagcgcccttccacgaagtacttgcaaatgactttgcctttcttgtccgactgctggtggggcttgtcatggtcacgactccggtagcttccaccaccaccgtcctgcaatggacagggtgtggacgtaaaggggaatgaaagggaagggtagagatgggatcggggttaataagaagcacgggagaaggggatgaggggtcccttcagatctcacaagagcaccgatgggcaggctgcatctaacacggaggctgcgtgcaccttataagccccacggtgtggggtgttgctgcctggtgaggaaaagctctagcctttagagctgttagccacttacacctcaagttccacacaactgtgcaggaacacgtccaccacacccagaggtggtggcatgggtctccctgcaaaaccttccagggctaattggatggttcacctagaaccttctgaacctcagagatgtgttaggtatggctgcaggtgctgctaatgacatggttttaaacacagggtctcagcagcagcgcatctccccaggataactctagttgtcgctggttatgctggtcaacactggccagccctttggggggtggctgatggcagcaaggatcagcttcacagaatgactcattaaagggaaaaaggactaagaagggaccttggcccaaacatcagatcagagtggagtcaactcacgcccatgtcctcgtcatagaagtcttcgtcatcgttcattccgcccttgttcatccctcctcggctgccacctcggcctcggccccgacccattcctttccctcgacctcgggagcccctgccacggcctcgacttagccctgtggaggggagattgtgtgaagacctgctgaccaccccctcccccacccccaggactagattccagcagctgctggaatccctgccccacccagcgtgtcctctccaggcccctgcccacctcggcctcggctgtccttggagcggcggtactggttcagctccttggagtactcgtcatagtcgtcgtctcccattggctcctcactctctccatactggaatgcgcagaggagagggcaggagagcgtcaggtagggaacaatgaacactgtccccacctacacactgctcctttttgaaggatggtgaccatccaggggactcataccataacccgtttccacacagcctgacgacaggtggtcccaatccttcccactgcagtcttcactgtgaagacctgacccaataggcaaacccagcatggagcctccctacgtacacatcactgtggggctctaaaagggagtgggcagtggactgtggactggcgtggaaggtctgtgggtaggaccaggatggcaagtgcagtgcacctgccgctcctcctcctgggtcgggacagggatgaaggaccacgtgcctggctggaaatgtctctagaggactttcaggaaacttctctctagtgatgggatgttttcacagcacatcctgtgatacttcttctttttctttttttgagacagagtcttgctctgtcgcctaggctggagtgcagtggtgcgatctcggctcactgcaacctccacctcccgggttcaagtgattctcctgcctcagactcctgcatgaatagctgggactacaggcgcgtgctaccacacccggctaattttttgtatttttagtagagacagggtttcaccgtgttagccaggatggtctccatctcctgacctcgtgatccacctgcctcaggctcccaaagtactgggattacaggtgtgagccaccgcgcccagccgataccttttctactttaaaccacgtgaaggttttatctattccaaaatgataaatgaatatttttaaacacatacatctgcgctctgaggcttcccttccttcagaagggccgtatgtcttcctaccttggcctcacagcctctaccagcagtgctcacgccccggaaagcccaccagcctcaccccgacgtccccagggccagaggaaaccttacgtccatctcttcctcgtagaaatcctcttcatcctccgggtggtctcctcccatagagcctctgcccctgcctcggctgcccctgcccatgccgcggcctcgcgatcctccacggcttcctcggcccctgtagccccggccccggcctcggctgcctgcatggagattcagatagtgagcctccagcaggagcagatgccaccagcaagaaagaagacaacccacattttgctcctgaggtcaatcacttcagctgcctcctcctccttctcctcctcctcctcctccaagaagccttcctagatgccccaggtaggctactggaccctctggttctctcaatgggggtccctcagcaccccagacacacagctactccagtactcactccccttcctcacagggacttgtctacttagaactgcactgtccaatatggcaaacaccagcccatgggctaatgtgcaactaacacgtctggtccaaactacaagatgctagccttgaagtctgacaagacaagctagccctgtagtttggacctgtgatttagacaagactccaaaacacacattggacttcaaagacttagttaaaaaaaaaaaaaagaggctgggtgtggtggctcatgcctgtaatcccagcactctcggaggctgaggtgggcagatcaccttaggtcaggagtttgagaccatcctggccaacatggtgaaatcttgtttctactaaaaatagaaaaattagccaggtgtggtggcgcacacctgtaatcccagttactcaggaggctcaggtgggagaattgcttgaacccgggaggcagaggctgcagtaagctgagaatgcgccactgcactccagcttgggcaacagagtgagaccccgtctctcacacacacacacacacacacaaaaaaaaacccaaatgagaaagaatataaaatatctcatttgtctaatttgattacacgttgaagtaagattttaaacatattaggttgaaaacagattatcaaaattaatttaattggtttcacttttttcttcacttaaaaaaaaaaagagtggccaggtgcagtggctcaatcctataatctcagcactttgggaggcccagttgggcagatcacttgagaacaggagttcgaaacaagcctggccaacatagcaaaacctcatccctcatctctactaaaaatacaaaaaattaggccaggcgcagtggttcacacctgtaatcccagcactttgggaggccaaggcgggtggattgcccgagctcaggagttcaagaccagattgggcaacacagtgaaacccatctctactaaaaataaaaaagccaggcatggtggtgcaggcctgtaatcccagctactggagaggctaaggcacgagaattgcttgaacctcggaggcggaggttgcagtgagccaacatggtgccactgcactccagcctgagcgacagagtgagactctgtctcaaaaaaaataaataaataggctgggcgcggtggctcacgcctgtaatcccaacactttgggaggctgaggcgggcggatcacgaagtcaggagatcgagaccatcctggctaacatggtgaaacctcatctctactaaaactacaaaaaattagccgggcgtggcggcaagcacctgtagtcccagctactcaggaggctgaggcaggagaatggcatgaacccgggaagcggaggttgcagtgagtcaaaattgtgccactgcactgcagactgggcaacagagcgagactccatctcaaataaataaataaataaataagctgggtgtggtggcacatgcctgtaatcccagttacttgcgggagtaaggcacaagaattgcttgaacccagccaggcgcagtggctcacgcctgtaatcccagcactttgggaggccgaggtaggcggatcacgaggtcgagagatcgagaccaccctggtcaccaacatggtgaaaccccatctctactaaaaatacaaaaaaagccgggcatggtggtaggcgcctgtaatcccagctacttgggaggctgaggcaggagaatcgcttgacctctggaggcagaggttgcagtgagccgagatcgcgccattgcactccagcctgggcaaaaagtgaaactctgtctcaaaaaaaaaagaaagaattgcttcaacccaggaggcacagggtagaggctgcagtgagcctaaatcgtgccactgcactccaggatgggtgacagagcaagattctgtctcccaataaacaaaaaagagtgatgggatctcgctgtgttgcccaggctggcctccaactcccgggctcaagtgattctcctgcctccacctctcaagtagctgggactatccagtgtccttttcactttttaaatgtggctaccagaaaatataaacgacatggtggcttccaatctatttctacttgacagcactggcctaggatctccccaaagcacaggggctgccccagggaggtatccaagaaagactgctagaagaaccaatgggccgggcgcggtggctcacgcctgtaatcccagcactttgggaggccgaggtgggcagatcacgaggtcacgagatcgagaccagcctgaccaacatggtgaaactccgtctctactaaaaatacaaaaactagctgggtgtagtggcacgtgcctgtaatcccagctactcaggaggctgaggcagaagaattgcttgaacccggaaagcagaggttgcagtgagccgagatcgcgccactgcactccagcctggcgacagagcaagactccgtctcaaaaaaaaaaaaaaaaaaaaaaaaaagaatgaatgaacagctactcaacaagctgggcctcaggcagggctcacaagtctgagaacccctgcactggaagattccagaagccattctcaggctgggcagtctttctggcaggagatggttcaatggttctttttggttgctgttgttggtcaggctggtctcgaactcctgaccttaggtgatccgacagcctcggcctcccaaagtgctgggattacaggcatgggccactgcgccggcagagatgtgttctaagaggccagtcagggctaccgtgtctctggtgctcaagcctcctccaccttcctcccaaaggacacaggttcaaggttcagaggtgtggcagtggcaaggactgcagtcacactttgtcaggtgatggggctgggagaatgggggagcactgctgtggggtgtggcagccagctgtcagtgaccatggcccaggtgaaagagaagctgttcccttctccccccacagctgaccaggaagtgacctttcgggcacgctggccttctccctgcctcacaccagcctggtaccaccccaaccacagcccagcgggtgatctctccggtctcctgtgccatgcacatgcagagcctggcccttctttgtacacttatcccaaccctaagtgaccaaacttgaggttctgtgagaccaggccaccggggttggcccgggtggctccgatgccccagaggagaaactgtaagggcagggctcacctcggccgcggctgctgccctccttggcacgccggtactggttcagctctttggtgaagtcgtcatagtcctccttgcccatgtcctcctcctcgtcgccctcatattccccatactgctcattctcgtagtcctcgtacatgccataactcttgctgtccatcttggagtatgccttcttgggcaggggcgtggcatgcgatggggggtactgctggtgggactgcgtcccagagatggggaaaagaggtgagccggatcccacagccgtgggtgcagactaccaagatacccagggttccctaaacgaacatgtctgtctgggtgtcactactgtcccagggttgcactgctggtctccagcccctctggggactggttctcgtaccagggagtgggagtagcagcgggcccaagtgtttctgttcttcataaagggccagaactagaaagaaaacagaaccacagacccccgatccctgatgaacaaaggggagaagaagggagcatttcccaaggatgcagagcaagcgcacgtggaggggcctgggaagcaggcgggggctgcttggtcacaattttcctagggccctggaattcaataaatggcctgcttggcagccaggctggacagccatctcaaatgatgctttccaaagtgtggtaatgccaagtggtactagaagaagttaaagatactcataaaaacggaagcaaccaagacatccttcaacaggtaaatggataacaaactggtatatccagacaatggagtaacgacgaatatgtaacaataaagtgtgtattgggcaaaacccagagaactatacaaccctaagtaataacaatgtatcaataccggctcatcaattctaacaaagttaccacaacaatgcaagacattggtaatgggaaactggaggcagggaagggggcaggcagaggggagaagggaactctactactacctgctcaattttgaataaacttaaaacagctctaaaaaagaaagtcagggggctgggcgcggtggctcatgcctgtaatcccagcactttgggaggccgaggcgggcagatcacaaggtcaggagatgcagacgcgaaatgcgatctctactaaaaatgcaaaaatgcaacaacaacaacaacaacaaaatagccgagtgtggggcaggcacctgtaatcccagctacttgagaggctgaggcaggagaattgcttgaacccgcgaggcagaggttgtagtgagcagagactgcaccactgcactccaaccagggtgacacagcgaaacaacaactcaaaaaaattaaaataaagtccgggcacagtagctcacacctgtaatcccagcactgtgggaggcccaggcaggcagatctcttgaggtcaggagttccagaccagcctggccaacatggtgaaacccagtctctactaaaaatacaaaatgaattagccgggcatggtgatgggcgcctctaatcccagctactcgggagactgaggtgtgagaatcacttgaacccgggaggcagaggatgcggtgaggcaagattgcgccactgcactccagcctgggcgacagagcgagactctgtctcaaaaaataattaaaattaaaaaaaaaaagttgggccaagcgtggtagctcacgcctgtaatcccagcactttcggaggcaaaggcaggcagatcacaaagtcaggagttcgagaccagcctggccaacatagtgaaaccccgtctctactaaaaatacaaaaaaaaaaaatttgccaggtgtggtggtgggcgcctgtaatcccagctacttgagaggctgaggcaggagaatcgcttgaaccagggaggcggaggttgcagtgagccgagattgtgccactgcactccagcttgggcgacagagcgagactccatctctaaataaatgaatgaatgaacgcataaaaaagtcggctgcgcatggtggctcatgtctgcaatccccgcactttgggaggccgaggtgggcagatcatttgaccccaggaatttgagaccagcctgggcaacattttgaaaccccatctctaccaaaagtacaaaaattagccttggcgttatggcccatggttccagctacttaggaggctgaggcaggaagatcacctgagcccagggagctcgaggctgcagtgaggtgagatcacaccactgcactccagcctgggcaacagagtgagatcccatctcaataaacaaacaaacaaacaataaagcccactaattttaaaaaatccgaattatagaaaaacaggacaatgcaaaatacagctagacacacagacacacatacaagtactttagcagatctttaaaatgcctccagctctagttcataaaaagcacgcaatgttccctccatttcctgcctccctcaggtttgaaggccaaacctacaccagtagatcaatctcaactatggtattggacaatgaatcatttgttgtgatggatgatgctgggtcatgggatacctgggacagctttaaagacctactaactttaaaacatttctcaaccagccgggcacggtggctctcgcctgtaaccctagcactgtgggaggccaaggcgggcgggtcacctgaggtcaggagttcgaggccagcctggccaacatcgtgaaaccctgtctctactaaaaatacaaaaatcagccgggcaaggtggcacatgcctgtaatcccagctactcgggaggctgagacaggagaatcgcttgaaccagagaggtggaagttgcagtgaaccgagattgccccactgcactccagcctaggcgacagagcaagactccgtctcaataaataaataaataaataaataaataaataaacaaacaagacaaaacatttctcatccaaacccggacacccacgtgccaacgaatactgggtaaagtaatcataagatgatttgcggccgggcgcggtggctcacacctgtaatcccagcactttgagaggccgaggcaggcggatcacgaggtcaggagatggagaccatcctggctaagacggtgaaatcctgtctctactaaaaacacaaaaacttggccgggagtggtggcgggtgcctgtagtcccagctactcaggatgctgaagcagaagaatggtgcgaccccaggagacagagcttgcagtgagctgagattgcaccactgtactccagcctgggcgacagagtgagactctgcctcaaaaaaaaaaaaaaaaaaaaaaaaatgatttgcttttctcttatgggattttctgggggaagaaatggtatacaaactgaacaaataatttaaattgctgcttgaaatgagagcgacagtggctgagtatctaacctctgcctactggctacttgagaacatttcattctcttgccaatttcccaaaaaggtcatttgtgaacagtggaagccagtcagccgtgacgtggaccagtcagcatctttctctgagacatacagggccttgctaaggccgcatggaggaggctcgagaacatgcctcatggaggtcagctagggcctgggttcaaatcccagctcctttacttcagagagctgggcaaccctgttgaaattttcttttccttttgagacaggatcttgctctgtctgtcacccaggctagagtacagtggctgatcatagctcactgcaaccttaaacttctgggctcaagggatcttctcacctctgcctcctgagtagctggaactacaggcatgcctggttaatttttttattttttgtggggtctcacttggttgtctgggctgccttgttgaaattgtctaagtttcagtttcctcactcataaaatggggattaaattaatacctgatggcccaggactgaaactcacaaaaaatgcccagaacacagcaagtgctcaagaaacacaagcagttgaactcctcccggccccagagctcagcagtgcatgccagtcactcaccggcgcatatggggggctgtactctctgtacttgcggtgacctttctcactggggctgaaatccgagtcatctgagaagtcagagaagtcatcgctagaagaagcatggcgctgtaatgacaggggaaggagactcagcaacctgccacaggcaggccactcgggcacagtcagcctcaggacaaactatgctggcatgtgccgcagggctctgcgcttcacctgaaacacctcacctggggcacttagtggcaatgaagcataagctaccaactcttttaaaaaaggtctttatccaatttgagataagcaaaggcattaagagtgccctctggggtggacagcaaaagctcagcccctggggctctcagccaggcccaatgccaggcagtggcagtcccaggggatctccgacctactttgtgcttggatttcctcctcttcttcgacctccttttctctttctcccgctctttcttccgtttccgcttcagtctcctgtgggacttctcctcatccgaatcactgtgatgcttctcccccttttctttccggcttctctcaggccctccggaggtatcctgggtctcctctgccccatcatcttccaattcaccttcttccaactctccatcttccctacaaacaaaccccaatcccaccatgaacacagggtttgagaggagacctcctagggctctgggctggccaaggctgacaggaaccgaaggcctgactgctgtgagcgaagtgagaccctgggaggacatgggggccatggcctcttgttccatcccttatcctccccctgaaagaactgtgcttgctccagtctaacctggctgggggaggggtaggagtttaagggcattaccactaacaccgggacacatctacgccagatttcccaacagaactagtgttcttagaagaagaaaccgacaaggtgctgtggtcacataagcaggaagagccccatcttggggattcataatgcttaacgctgcacaacttccaggaagccccatagtccagaaacccacacagctctgctgtgaagcacttggggcacttctaaaccttgcttgaccacagaagtctctctcccagggagcacagacccacatcccctccctcccaggcccaggattgcctgctgggccccgggccccagtgagctgggcgtcagtgccacctgaggctgagggcggtggctgtgcaccgtggagagggccttggttctgaaccaggggtggccccaagctacctgggacccacccacaggcaggcctgggctgtggcctgagaaccctccaagtactttattacaaaagccccatgagaaccgctggaaacaggctcagagtcccaggtcacaaggtctgacccaccctcgtcagtcccacacctctaggccggaggcaagcaaacactgagcagctggaggaggggggacggatcccaggcccctcctgagggcctcacatgataccggccctgctttctctccctcctctgactcacctccagatagtggaaccccttctggctccccatcctacactcttccaattcccccgtgtcaccccaatctccaggactttaaaagtgctctccaaacatgacagacactgcccagtggacattctgcatatgtaaatatctatggggtggggtaggagtgaggaagaaattgggttcaggagggggaggctggaaaaagaatccagtttttgagccaaacccacagacacagtgttcacaagtacaggagttggtaaaggaaaaaaacaatctttttgaataattttaaaaagctcccaaagttccccatgaatgaccacaaaaaggcttgcgtgagagcatccaactccttccgtctcaattaactaggacacaaagagaagtgatgtaaggaggaaacatcacgagcccaggccccaaaaggttagccacaaatggagctatctctgcggaaaggcccgcagctgcccaagcgggagccaatgtattaggcgtgcttgcctgaaggttccagggcatgtggcagactcctcctcccaggaccctccactgtcctttcgcttatgtccctccctttgtctgccttggggctgctacccaaacatcaaggagcgcctcaagagcagctttttctatgaactctcactcccagttcaaaggggatgggttctatttcaaacccaagtggcccagccccacagatacccctgggcagaggtcaagggcaactctcaaaacagaatgcaggacacaaaactctttctgctgcttcaaagtcaacaacacaggtgacctgacccatgtgcaccttgtgttgcttccccgactagcaaacttggaatggggcgggggtgcaggctgcagtcctgacaagggaggtgccttcccgctggggtgcggcccacagaaaccaggcgtggagcaaagtcctcactggacacctcacccacaccgaaaagggccacatgactgggaaaactggttttgtcccaagggagaagctgttactcagtgacatggcaaactgcccgccgccaggagctgtgcagacactgggaggtggcaccctgatgggaatactgggggcaggccagggccacacctcaagagaaagggagagacggacagactgagcgggagaaggcccgggacagactggaggtatacatgctggggttccataaagaaaagctaagaacaacattactctcgacacttaagtctagaagggataaagctgagagggacatgatcaccacccaggccactaatattttaaatgccatatctgtgccaggttgcttgactacctccttttctgcactgacaagaaacttggtccacaaggcaggtgcctgatcatcagggctgggtcagctgagccggagtgggtggcagcctcagcacgccctcccttatgtccaacaccgcggcacagcaggcgacagtcttgcccagggtcagctgaggcctccttccctgtcctgatgccactcgctggctcggacgaaggtacaggctactctacatctaacacctgcgggcagaggacaaaagaccattcaaggaactccaagagccttaaccatcatccagaatgattctagaaaggaatcaccaaggtagagaagtgcagcattcaaattcaccctacaaagacctgagccaaagagggattctgcacattatcgatattaacagctccaggcacatctgggctcaaagagaatcaaccatacaacttttcacaaaacaggcagtgactacttgaaattttgtttccctaaagttgagagaggcagagaaatacataggatttttttgttgttgttaaactgctgacggttgataaaggggcactgagacagcaacaataaacagatcactgcattctcagggccctctggccatgtcaggccctcaagcccctccgagccctgggctaacttctgtccacagtcacctcaaggggtcccccctcacgacacccaagatgctctcctagctaaacgtcctgcgtgaacacgaggtcttgactatattcttcagactctgttcaacagaaagcaaaaagaaaggaagtcgagccaaatgggaatcccgtgggccaccagcgcgacggcacaaaggcggtctcaacaaaacagcaaccaggtttcagcgatgccacttaacagactgccggcaaaatccgtgtcagagtgggattaaatgccaagggaacatgcttaatagacctcgacataatcccccaagaaaagtgggggaagccccaccgcgctaatcatttcaatctagacctgccaaactctcttgagacaagcaagcaggagaaaagcctgccgtggcggcctgtgcagggagcactctattcccagagcctggattggcaacgcctgacatggctgcactcggtccgctgcccagagccctcgggaacaagaaagcaaccaccctgggagaccgacttggaactggcccccatgaggaaatgggaagaggccaacgccttgccttgagccagtcctgccccgtacctcccggacaaagctcccgggtatttcggttcccattttcagcactggctgctcctccccctggtcaaagaacagatctggacgcccactctaaggaacaggccaactccacagggcccacaaggatgctgggttcagcacacaccacggacttggcaaaaacagtgcttggtaaagacatttcatgttcagaccgggtgtggtggctcatgccttcgggaagccaaagcaggcagatcacttgaggtcaggagttcgggaccagcctggccaacacggcaaaaccttgtctctaccagtaatacaaaaattagctgggcgcgatggtgggtgcctgaaattccagctactcaggaggctgaggcacaagaacttgaacctgggaggcagagattgcagtaagccaagattgtgccattgcactccagcttgcgagacagagtgaaactgtgtctcaaaaaaaaaaaaaaaaaaactaatcccagcactttgggaggccaaggcaggcagatcacctgaggtcaggagtttgagactagccttgccaacatggcgaaactccgtctctactaagaatgcaaaaattagaccagtgaagtggtgggtgcctgtagccccagctactcaggaggctgaggtaggagaatcgcttgaacctgggaggcggagattgcagtgagccaagatcgcgccactgcacttcagtctgggtgacagagctagagactcggtttcaaaaaacaaaacaaaacaaaagatatttcatgtccaaagtagacatgatatttcaaaggagatatttcatactgcctcatccagcagcctacagattcgggcctcatgctcctttctgcagaccaagtaactcaaccagctccacctcttctctggagtatgctcttagtctgtaacctgagccttgcttttctgatctactgaatgggataacagcagcacctatctcaagggctgtgaaggttaaatgaaataatagggataaagcccttgacatgaggaacaggcacaaaggaagaagcagctgttggttttaaaaaccagctagcatgagggcatctctccacggaaagccctaactggctggaatgctaagtgggaagcatgttctctataagaaagctacagccagggccgggcgcggtggctcacgtctgtaatcccagcactttgggaggccgaggtgggcggatcacctgaggtcgggagttcaagaccagcctgaccaacatggagaaactccatatctactcaaaatacaaaattagtcgggcttggaagaacacgcctgtaaacccagctactcgggaggctgaggcaggagaatcacttgaacctgggaggcggaggttgcagtgagccaagatcacgccactacactccagcctgggcaacaagagtgaaactccgtctcaaaaaaaaaaaaagaaaaaaagaaagctgcagccagctctccctgacggacactgctgactgctggtcaacaagttctttctacttggtcacaaccacacatacactgttctcccaagccatcctgctgacaaaactgacaaaagcaacatctccccttcctcagctctaatctaggcagtaccagaagccaccaagtggctaatcaagacaaaaaggcgtagggagagctgagccccgggaaggaacaaaggcttcttacagaaatgaagcttggcaacatggcagctctctagacaagagggttggacgaaagctgaaaggggcccagggtttatggatcaacctggtttacaagagtttaaaaaaaaaaaaaaaaaaaaaaaggcaaagtacaacacaaaagatggaaactcatgggaacagcagcggttaccttaagatcatgagagcccttgataagaggcggctaggttaatgtgaaggtcagggttatgatcattaactgcccagactctcaacaaattgcctgggtaggctctgaatgacccattaactagggacaaaatcacaaaaattacaaggaggcgccgcctcttcaaatatttaacaaccagcctaaatgcagaagtccaggatccccaagtccgattctgcggactagtcgtttattaggattgaaggcgcagggcctttgcttcagaaattcagctcagggctcatgccaaagaaaggcccgagaccttcccttgagttaggacgtaatgaagcagccataggggaaacctcacggagggattttcagagccaggaaattcttgaaataaacctctgggtcttgcacatgcttttcagtgtccttactacctaggttcatcaaccagaaaccaagaacaaatgtgctctgtctccttttcttcagcattctcaggtgtcatcatagcctgctctgtgacatcatgccatttccatggtaacgtgcctacgccacggcaaccacccaagtgagacacaaaactggcaaagagaagtccaggcatcagcatctgtaccctgtaccctacaccctcacttcaacataagacagtctacccactgctggcatctagatacgaagacacctactggtggatgtgacgataggagaaattggagccatctgaacccagcctgggtatttgagatattaattgttaatcttgttagaaatgagttttgtagaaaggttttttgttttgttttattgtcttttcttttgagacggggatcttactctgtcgcccaggctggagtgcagtggcgtgatttcggctcactgcaaccttcgcctcctgggttcaagtgattctcattcctcagcctcctgagtactgggattactgacacctgccaccgcgtccagataatttttgtatttttagtagaaacagggtttcgccatgttggccaggctggtctcgaactcctgacctcaggtgatccgcctgcctcagcctcccaaagtgctgggattacaggtgtgagccaacacacgcggcctgtagttatgtttttaaataatcataaagttagagattcatactgaagaatctacaggtataggccagacacagtggctcatgcctgtaatcccagcattttgggaggccaacaggcggatcacttgagccctggaatttgagaccagcctgggcaacatgaggaaaccccatctctacaataaatacaaaacttagcctggcagcatgtgcttgtagtcccagctactcaagaggctaaggcgagaggatcgattcagccaggaggtcgaggctgcagtgagctatgattgcaccactgccctccagcctgggcaacagagtgagaccctgtcagactgcttgagcccaggagttagagaccagcctgggcaacacagttagaccccgtctccacaaataatttaaagacagggtctctctatgttgcccaggctggtcttgaactcttggactaaagcctgccttggccttctcctgccttggcctcccaaagttctgggattagaggcatgagccattgcacccagcctctataaataactaaaaaaaattttttttccataataaaaagttaagaaagaaaaaagttctggccaggtacggtggctcatgccagtaatcccagcactttgggaggctgaggcgggcggatcactagatcaggagttcgagaccagcctgaccaacgtggagaaaccccatctctactaaaaatacaaaaattagctgggcgtggtggcgcacgactgtaatcccagctactcaggaggctgaggcaggagaatcacttgaacctgggaggcagaggttgcaatgagcgatcgcaccactgcactccagcctgggcaacagagcaagactctgtctcgaaaaaaaaaaaaaaaattagccgggcatggtggcacacgcctgtagtcccagctacttgggagactgaggcaggagaattgcttgaacccatgaggtggaggttgcagtaagctgagaccatgccattgcactccagcctgggtgacagattgagacttcgtctcaaaaaaaaagaaaaagaaaacaagaacttccaagtgggacaactcagcaatgtgaggagaggctgcaaggtccccaagcagttatttaataatttcccagcagagagctggaatctgggcttgcaggcctccacactcctcaccaaggcctaaacaggctcagagacaagaaggaatttgcccatggggtcacagcaggaagaagcagaactagaaactaagtccagtacttttggatgcaaagaccagctcttaacctctacaaattatttgacaactacaaattatgtcaaaaagagtaatttgctaaacaggtcaactgacaaaacaacgcccaccctgaaatgtataatcgagtagggaaaaataagatatacatacataaaacagacttcatgaatcagtattccaagaaatgccagaatgaggtaccaagactttgggcaaattccttaaacactctgcaccccagtctccataactgtgcagcacaggcaaccatggagtccccaggatggtgtcatgggagaatcccatgaggccatgtaacacaagcacttagcaggaaccttgcccagaataaatgcttaggagtaaaacctacccaaacacaaagacacaaggccgatacggtccttccaatatcaagtgaaggaaatggtagcatttcaaaaacctaaccaaagacatctggatagagaataagggctcatggaaagaccgaaggaattctggcaaaaaaaaaaaaaaaataggactcatcccaacacaaagagaaagcaatacaaaaatcccagggagtgaaattccaaagtcccctaatatgaaacgaatgccttcgcccccaagtgtgcagtgtccactctggggtttgtccaagcatgcaaaccacttaggcagaacatttctgtaaagcttcaaacaggctgaccgtgaaaaaacccagcctgctaaaaggaagcttgtggagacaaagatgccattttttttgcctgagtatctattcttccactcccacgagctctgaaaatttgcattcttgagcaaaggtatctatccctcagatccaagttactcctggcagatgaacctctggaatttgcttctcagcaatgaagagttttctaaccaccttctcatgccaactaagcttcagatggtttaaagctgcaaagatcatggttttcatcagaggaccgatttctatcactccagaggagaaagtctaataatttaacttatgaactaagacttctctttgtttataattatttatttatttatttctacacagggtcttgctctgtcacccaggctggagtgcagtggtgtgatcattggttcaatgcagccttgatctcctgggctcaagcaatcttcccacgtcagcctcccaagtagatgggactacaagcatgcaccaccatgcccagctaatttttgtattttttgtagagacagggtttcaggccgggcgcagtggctcatacctgtaatctcattactttgggaggacaaggcaggcagatcacttgagatcaggagttcgagaccagcctggccaacatggtaaaaccctgtctccactaaaaatataaaaatcagcccgttggccgggcacagtggctcatgcctgtaatcccagcactttgggaggacgaggcgggcggatcacgaggtcaggagatttagaccatctgggctaacatggtgaaaccccgtctctactaaaaaaaaaaaaaaaaaaaaactacaaaaaaataagccaggcgtggtggcaggcgcctgtagtcccagctactcaggaggctgaggcaggagaatggcatgaacccgggaggcagagcttgcagtgagctgaaatcgtgccactgcactccggcctgggtgaaagagcgagactccgtcttaaaaaatatgtaaaaataaaaataaacaaataaataagagatctgggcctaagattcttgagatttgttcatataccacctaaagaatttcttagccaggcgcagtggctcacgcctgtaatcccagcactttgggaggccaagacaggtggatcacctgaggtcagtagttcaagaccagcctggccaacatggtaaaaccccatctctactaaaaacacaaaaattagctgggtgtggtggcgcacacctgtaatcccaactactcaggaggctgaggcaggagaatcgcttgaacccaggaggcagaggttgcagtgagctgagatcatgccattgcactccagcctacgtgacagagtaagactctgtctaaaataataataataataatttcttaaaaagaactgatacaacctattcgttaatttctagtcacctgtgggttccttaagggcagacaagaatgaggttcacagtaaccccacatttccaagggcccagcacagggccaggtacagattgggtacatgctcagtgcatattctatatgaagtatcaatctcagctctcatacccttttggtcaatttcatcaatagaaacagtaactaatttccaagaaaactttttcagcaacctgtatcacttaaaactttgacacaaactcattcaagtgtttatcaagggtttccaaataagcttgaaagtgatggatgcacagactgaacagaggagacaggccctgcctcggatgcagcccacccgtgtggcccacaagcttcagttactgtgactgctctcgttccccgtggagtggcagggcctgcctggaatcccaaggaaacctaagccctggtgtctgttaggaaaatgaggagggcaataatccaagccacctgcaacagacttttggccaagcgacactagcgtctgggcccagctccctcggttaggccatagcagggatgtaatggccatgatccacttccacacgggacctcaagaagtctccagttacttctaatgaatgaaaatcccttccatttaagagggtttaaaagcctaggcttgggcctctacattcactgaaaggagtggaacgcagggagaatggagccacagtggactgaggaaacagttaacacccccaccctctcgagggccaactttaaatggaatatctatattccctcctcattccttcccaccacaaaaaaaatgacaatggctgctgtgcaggcataccagacagtgcataccatatcacgtggtgggcagcaactttctactcaactctgctgctgtaacgtagaagcagccactgatgatataaatgaatgagtatggctgtgtgccaataaactttacctactggccaggcgcggtggctcatacctgtaatcctatcactttgggaggccaaggagggtggatcactcgaggtcacgagttcaagaccagcctggccaacacggtgaaaccccatctctactaaaaacacagaaattagctgagcatgtggtgtgcgcctgtaatcccagctactcaggaggctgaagcaggagaatcccttgaaccaggaggcagaggttgcagtgagccaagatcatgccaccgcactccagcctgggtgacagagcaagattctgtctcaaaacaacacaaaccaacaaaaaaacactttacctacaaaaacaggctgggtgggctggctttggcccgagaatcatagtttgccgacccctagcctggatgcaacggctttcacactttttgacactgacccacatctgcttctttgcatttctcccaaacaaaagtttccagaagccacatttaaatgcattctgctttttctctcctcttccatttccttggttttccaatgcaaaagaaaaagatcaataattggacttcatatcccactagtggctataccccacagtctgaaaaatagcacaccagatccaccacagtataatggtatgtatagagatggggtctgagtaccagccaccccgggttctaactctgcctgcagcacacacttgttttgtgacctgggacaagtgacttcacctctctgttttggtttctcctcaaacagcagaggtaaaggttaaatgagctaatgcatgagaagcactcagaagggctctggcagataatctttgaccttcaggtcaattgtgcacaaatggcactgttgccccttcggaaagacaaagacactgacttaggagatgaactcaagaatcacatccagtttgcctaactcccccaaccatagctgtccaccacccatcactctcagcagagggccaatcccgtgtggagagaacatggcagcacccaggcagacatggtggcttatacctgtaatcccagcactttgggaggctgaggtggaggatcattgaagccaagagttcgaggctgcagtgagctattaatactatgaggtgccactgcattccagcctgggcaacagagcaaaaccctgtctcaataaaagagaaaaaacaaagcttttggctctggagttcactctatcctttctgggacaactgacaggcatgaccaggaacctgatgggcctgcctgtgatctagccactgagcctaaccttcaaattaattaaggcatctgctttccaagtgcatattagtaagctgcaagcagcagcagcaaccctttatcgtggccagaaactgtagaaggtaggccagacacagaggaagggaatacgaagcctggtaaaggcagtaacaaccctagcccgactctaaataaagtcttcatgatagaagggttctctgcacactcagaaaactcttgggctccaagaaaagccggggaggaactcagttactgaatgaacaaaaccttatctgactcagccagatcccaaaggagtgaagaatcctggagctggatgagaccttgttcattcccctctggagagagtaaaggacttgcgtggggaaactgactagtttgcagtggtatgagattctagatccctggcttcccagttctcagaagccctactgagactacagcactgactcggactctaattgcaaaagatgaacacaggaggtacagtcagcattaagctccagacagtatgaccatttgagcatccataaaaagacactgagcaagcaagaaatatcttaagatggcttccacttagtgtcaaccccaattggctccctgcaattaaataagctgaccagaaccctaagagatgaaagataaatgcacttccttcaaaaatagatgttattcttacttctgtttatacaccaactgtaaaagttctgtttcaaattcttctctagtagggaaagcaggaagattcactgaatgctggcattgtgtgggtgtccccaaatgcactcatttgaccacaaggaccctgagaagtgggcattttatactcgatgcctactgcacactgccggggagaagccaggcctgaacagttttatctggctccaaagtccacagtcttcctccacatcctgttgccacctccgacattcaaaaagatgtcaccacttgcctgacaaacagggcactgagtcacctattcacacagatgcgaaatggcaaaaaaaatacacgagaaagatcctttatgcagaccagtttggccagaagcagcaaactatgctctcagcaaataatcctgcgttctgttaagaaaaaaaaaaaaaaaaagtaacaggacacaactaaatctagcaccaaccaagaggccgtatcttcatttttgtcaacaactactaagagtcaccccaatgggtgatgtgccagaaatctatttaaaataaactgcctatcgcacctcattacatcaccagtgaaactgtacacaatgtcttcaaaactgcatctgcattaactcctaaaagcaaaagcgttctgcagcaaagacaaggccaagaaactgggagtcaaacccatgaagtttggctccccccaatcaatctcatttttactttaacttatccccatgaacttgacatgccacccagacaaactggcagcttttccatcctattaggttttaattatgaaactggcttcataccatgttattcggagaggagtccctccaccaatgaggctgctcctacagtctctgatctgctgaataaataccaattgccagaaatctcaggagtcatccttttttcttagctgtgctgccaaggcacaggttaagcgcctggctcaattcagctactttgcttgctattcactctgtcactcaactctcggtgtgaatcggacccagttgctctggcactagaattactgttcgtggggaccaaaattaagttctctagaatctggtttgacttgatagctatccacggagacctggaaatagtttcattagcaattttcaccagaggtatttactgtaactggatctgacctctatggagagatgtttctacaggcccaatagccataaaaatgtaacaaaaggaagtgaaggaccctcagacagccatttctctcccatcagggaagaaggtaaaagatctaagagcaagaagcagaggtgtaggcaccgttaaataaattactaaccaggcccaatatgaaattgctctacattcaactgtatggaaacgcaagagtcaaaaccgttcatctttaacttgccaggcagttgaacagccaggtccacaggtacaaaacaattctcccctgggatcagccttcctggctgtggaaaaaccacagcagtggcttactaaaatagctggctctacttagagaaaactatggcttataaagaaatcaaaaatttaaaccttcagagcagagcaaaattgtacctgggggagaggacaggccatgaattagtcattttggggaaccgcatttttttcttttaaagagcaaatttgaggggaattaaaaaaataaaggagttttaaaaaataaaggggttttatgacgagaacatccatatttccatggtcacaacagactttttttctactaggagactttgatttgctttcaagttaaatctctcacccagagaaaataaaaatgtaaaagtttgtaagtgtataataagatttgttattaaatcagggattctgagtgacacccttttctttttttttgcaacatccattaatttgatttttaactaatactggtacatcagtctggggggaaaaaaggcagtactgtgacatttcaaaaacagattaccaaaatacagtttttgacttaattactggggcttctaggtcttaatggatgagatttctttgagaatggaaaacaataaaccgttgtgttgacatgcctgtgagctttttaaatgcttggggaaatagtttcaaattcactgaacattgctaaaaaatttcacttacaaaagaaatctcatttccttaacgtttctttttaaaagtcaatttaaataagcaacttagtagcctttggaacttgggtcatcagtcatccagtttctgttctcagctcctggagaaagaattttacaaaggatgggaaacttcaaataagtgcaattcattttgggctgacccagtgccctggataatgtgttttgttcggttcgtgcttcagacatttcttgcaggatatcgtagtttggagatttcttcctcccgtaactgattttacatacctaggatcaccactctacggcagttgtgaacatattaagaggaagaaaacaagtggcctattgaattgcagtttcctcatctacatgtgcgtgaccttttttccttgtaagaaggaaaaaaacaaaacggttcttttggagagggccagggttctctaagtatgtcagggatcaaaagtgggaaactgggaaaatgcaacttcaacgtgttttgtcttttaacggaacttatgcttgtaaaacacatcagaagtacagtgtttggttctgcaagtcatttctgttgttgttttttccttgttacgtggaggccggggggactgggggctggaggaggtgttccctccaacatgactgggcgtgtaacacgtttgcatcaacttttcacagtcagacatgtgctttcgaacaaaggagcagtggagacaggcagagatgggggcttgacacagtttacagattttgtgcttcaacagtactttacaaatgacttgctcaattttaacgtccatcaccacaagagacattggagtaaaatgagaaaattggagctacttgaaccaatcttttttggggagtgggggggaggggaaccattaatttgaatacctgcatcataaatcaaatccagtaagcttgtctcctacaaatggacttgaagtatccactttcttcaaagatgaaggctggagacaaagcaatggattgaaatggaaagaaggatgccaagggtctgaaaacatacgggccttttacatcgatttttgtcatgttacagtaacacacttttttttctgagaaaactgtgtacgtcaaattttaaaaattaaacattgaaaggatgtgcaagtctaaaagggctcaacagggttagaatcctgattcgaacatatcaattcactctcaagcatcactttggtctaaaggcgaggaggaaggcaggcagtaaagggagaaaaagagggagatcattgaattactcaataaaagaggctacttaccatcccaacccattgtaagacatacacttctgacataagagaactccttagaggtcgaataaagcgtgtaagcacctttgagtaatgcacctgcccccggagagggggcccggaagcccaacgagggcttagcgaacagacctttgctaatctgtttatttccttgaactggagtcgggctgcgatgggctgcgattcccaggacgatacatttaattagaacaaaacagaaaaaaaaaatgttgtaaaagctcaccaaactgctgcacttgtgtctctgaatgtgggtggcatttcttttaaaaggcaaagtatggtctgtgaaggagaaaggggaaaggggaggtgggagtggggagaaggggtcgtacgtacagcctggcaagggaagccctggctgagaccccccggctaaggaagggtcctcagcggctccccagccagggctgcgacggagtagccatctgtccagagcgttctcttcccctctccacccccattccctccaagactcgctttcctgccggctgaaacccaccgtccgtgtccaaacctactctccagccgcctcttctctcgccccaccaggaaacagtgggcgaaccctgcaccccaactccttctgctcgagcaggggaaggaaacggggccccaacctcgccctgaaacgcgccgggctgaccccattatcacccgccagccagagaagggcgtggggggcccgcgtttcggacttaataaagagaagggggcgcttcctttaacgccctgccaaagcacaaggaaatctccttttctctcccggaagagacggtgccccattttaccccgacagaggggggaaccccaggagaaagcgcgggaccaacttcctctccctacaaggcagggaaaccaaaccttacccccgcaaaacaaggctgagaatcctccctcacgtcacctacctacgaaaagcgagaggacccctgccctttagcaaaaacacggggaagagtcttctctaaaaaaataggctggggttttcatcaaaagggctggagatgcatctcccccctccccaattcggccttctaggggatagctaaaaaacaccccccgccaaaaaatacaagtgctatagagcacccacccaaatgacccccaattacaaggatggagaagggacctgaatgaacccccaccttctgcctcctaagctaaagtacctatcatccaagtaggacagggtgtgcctcccccaggagaaaggatactgccgggggctgggagacccccaaccccaaacccctaagagcggggctgttgttcgagatccccccaaaaagggtccggagcccctcccccatccccttccccgaagccaggcgacgggcaagcgggcccgtagctgccagctccgggcgcaggggcagccaggacccccgtgggtctccgcagcaccccccacggcgccccctccccaggacaggcggacgggcgcggggggtccgaggggcgcctcctcaccttcccctcagcatggcgcccaaaaaagacagagcgagagcgagggagagcgggcgagcgccgcgaggggggggaaacgcatgaggccgggagagaaagcaagcgagaaagagcgagcgagcaagcgatcgagagacacccaccgaccccgcccttcctcctcctcctcctcctcctcctcctccgcggcccggcccaacatggcggccgccccccttcctcctcctcctcttcctccccccggggacgcagccccggcccaaccgggggcctgacctgtcgtcagggagcgggaggcggtggtggaggaggtgcggggtggccgggcgggcgtcgggggaacacggaggaggcgaaggcgttgatggcggcggcggcgatggcggcggcggcgactctgatggcggcggcgggggggtcccgggcgcggcctccatagttcctttgggggggaggggatgttaatgcacgaaaaaggactgcttgggcgtggcgggaggggcacacttaagctcggagggctcctgatgggaatggggtatatattttttcggtttcggaatcacctctgcgctgacctccgcgtaggccgcacggcctaggcctcggagggccgctcgccgcctgctttctccgcagcccacccttgcggtcactcgctcactggcgcggggccctcataggggcgagagccccccccccacgcacccccggggggcgggacacccgggagacacggacactggtgggtggttgggtgtaattagcgcgggccgcgcgcgatggagcaagcgaagggtaaggggagaagaggagagcgagcgaggggggtggggggttaaaaagaaaaaaaggatttgagggagagagggaacgggccgcggagacgggccgactgtctcccttctctgcccgccctgggtgccccggctgcccggcccccgccgcaatcaggaattgacacaaaatggcggctcggcccgaaccagcctagaggctgaggcgggaggaagggtgagatgggagggggaactgagaggcggaggcggaggccgtgtcacgtgcaggagaggggtagagaccgcttgcccgaaggccggcggaaagagccgaaggcaaagggcgaggccgaggggaggcggaaatagccgaaaggagctgagcaggagcgaggaggcgacgggggagagccagaaagagctgaaggtggtgatatgggtggggctagagagagcatgagaaacctaggggagccataaatagcctaagccgatcgggaccggggaaggaggagaaactgagacggtccggaaagagccgaaagcggtgtccgggtgggtggcaggaggtggaaacagccgaaagaaaagcagccagggtaatgcgattaagagaatgagctgaacgggcggggctgaaggggagaataaacgactttcaggaattcgccggagagcaagagggaaaaaccgaaaattgctagtttgaaggaaggcgggaagagccaatagttttaggtgggagaatgggagggaaggaattcaggctacggagagggaaaaaaaaaataaccgaaagctggaggccaggtgccgagagtcggaggtttccggagaagcgatgaagcccagccagcccggaggtgacgtcactcgacaacccagtcgatgatgtcatcattggatgcgagaggggcggggcttggtagtccctcaggggagtttaaggacctggggtgtaggacccatggaaggctctcaaatagcagagctagaaacactggccggtgtcgtagactgtacaaacaaaatcttttgaccctcataaccgtcctaacataagctgctgctattcccatttgcagactgaagttcggtgttttaagtaatcggttcacggtcataggattagttctaaaaagcacagcaagattttttttttaagagacagagtcttgctctgtcgcccagactgcagtgctgtgacacgatcatacctcactgtaacctcgaatccagggatcttccttaaatacttgttagctctttctacagtgccagtccctgtgatggagcatgggaacagtttctgtcttcatggaacttaaccgataatgccccaagggagagaaacagagttaaagaataaagggggtgggtggagtgttagaggagggtcttgtaattgttcttttaggctggtacatgaaaaagaagagatggttccaggcagaagaaataccttatttcaggcggggcgatgttgctcacgcctgtaatcctagcactttgggatgccggggcgggcggatcgcttgagctcgggttggagaccagcctgacgaacatggtaaaaccccttctctactaaaaatacaaaaattagcaggacatgatggctcacacctgtagtcccagctgctcgggatgttgaagagggagaatcgcccgatcccgggaggtcgcgaggctgcagtgagccgagattatgccactgcactccagcctgggcaacagagtgagactcttgtctcaaaaaaaaaagaaaagaaataccttatttcaggccctgacaaagcaaagaccacttagattccaggaagagagaaaaaccgtgtcaacagtgataaatctggagacagaggcaccatgtgacttcctggtatattgatcctacttttttttttttttttttgaggcagagtctcgctctgtcgcccaggctggagtgcagtggcgcggatctcggctcactgcaagctccgcctcccgggttcacgccattctcctgcctcagcctcccaagtagctgggactacaggcgcccgccaccacgcccagctgattttttgtatttttagtagagacggcgtttcaccgcgttagccaggatggtcttgatctcctgacctcgtgatccgcccgcctcggcctctcaaagtgctgggattacgggcgtcagccaccgcgcccagcggatcctactgttttttaaatgttccagctggcagcggggcgtggtggcacacacccataatcccaacactttgggaggccgaggctggcggatcacttgaggtcaggagtttgagatcagcctggccaacgtgacgaaaccccgtctctactaaaaagacaaaaaattagccaggcatggtgtggcgcgcctgtaatcccagctacttgggagactgaggcagaagaatcgcttgaacctagggggtggaggttgcagtgagccaagatggcaccactgcactccagcctggatgacagagcaagactccgtctcaaaaaaaaaaaaaaaaaaaaaaaaaaattagccaagcgtggtggccggcacctgtaatcaccagttactcgggaagctgaggggagaatcgcttgaatccgggaggcagaggttgcagtgagctaagatcatgcactccagcctgagtgacagaaagactttaattaaattaaatgttgcagccggcacagtggctcatgcctataattctagcacaggaggattgcttgagcccagaggttcaagaccagcctgggcaacatcgtgagaccccagtttcttcaaaaagtcaaaacatggccgggcgcagtggctcacgcctgtaatcccagcactttgggaggccgaggcgggcagatcacgaggacaggagatcgagaccatcctggctaacccagtgaaaccccgtctctactaaaaatacaaaaaatgagccgggcatagtggcgggcgcctgtagtcccagctactcgggaggctgaggcaggagaatggtttgaacccgggaggtggagcttgcagatagccccactgcactccagcctgggcaacagagcgagactccgtctcaaaaaaaaaaaaaaagaagtcataacattagcccggcttcatgctatgcacctgtggccccagctacttgggaggctgaggcaggagaatcactggagcccaggaggttgaaggaggttgaagctacagtgagctataatcatgccactgtactccagtggagactttgtctcaaaaaaaataaataaataaaaataaaaataaggccaggcacagtggctcacgcctgtgatcccagcactttgagaactctaggcaggtggatcacgaggtcaggagcagcctggccaacgtggtgaaaccctgtctctactaaaaatacaaaaaaaattagccgggtgtggtggcagttgcttgtagtctcagctactcaggaggctgaggcaggagaatcgcttgaacccaggagacagaggttgcagggagccgagctcacaccactacactagagcctgggtgacacagcgagaagaaaattcctgacaaaatgcttaaaataaatcatcagtggatgaaacttgttttaagaagctggtgctccccccaccatcccacctggtaccccagttgccagccaagaattgtgttacctttaccctgactatcgtctttctggatccaatctcagatctaatggttagataattattctcttctcctataaaatgtccctattagagtgaatcttaattggccaacaagagaccttttttccttgcatgtaagattgtaataaaatgttcactcatgctcatagctatgttgtccaaaaagttttctttaacacaccaagaactaatacttcaggtttgtaggaatggaaaggaaggacaccaaagtagctcactatgttcgattgtggatggtgccattccttcctttacaccttgatttttggacctcatgtattctgggttatggacaaaatcactgattgagaacatagaccacatctaagaggacagccattgtcttttcaaggtatggtcctgaaggggccccatctctgtagtttcaatggggccattctacaattctagatggccatctgcttttaagtaatggggaaaacaaaaatcccaccaagcaggaattccctgtacttcttcagtgtcatgatggaacattgtggaacattgtctgccaagcccttctgacacttcatctgacttttttatttttatttatttatttatttatttttatttttttgagacagagcctcgtactgtcacacgggctggagagcagtggcacaatctcggctcactgcaacctctgcctccagggttcaagtgattctcctgcctcagcctcccaagtagctgggattacaggcgcccaccaccatgcccaactaattttttgtgtttttagtagagacggggtttcaccatgttggccctgcagtctcacactcgtgaccttgtgattcgctcgcctcggcctcccaaagtgctgggattacaggtgtgagccaccgtgccctgcctgtttagttagtttttgagacagagtctcgctgtgtctcccaggctggagtgcagtgtcgtaatcttggctcactgcaacctctgcctcccagattcaagcaattttcctgcctcagccttccgagtagctgggactacacgcgcacgccaccacacctgtctaattttttgtattttagtagagatggggtttcaccgtgttgtccaggctggtcgagaactcctgacctcaggttatatccacctgcctggacctcccaaagtgctgggattacaggtgtgacccaccgtgccctgccaagttttttagtttttgagacagagtctcgctctgtctcccaggctggagtgcagtggtgcaatctcggctcactgcaacctccgcctcccaggttcaagcgattctgctgtctcagcctccggagtagctgggattacaggcatgcacaatgcctagctaatttttttttttttttttgagaccgagtttcactcttgttgcccaggctggacaatctcggctcaccacaacctccgccccccaggttcaagcgattttcctgcctcagcctcctgagtagctgggactacaggtacgtgccaccacgcccagctgatttttgtctttttggtagagacagggtttcaccatgttggccaggatggtcttcatttcttgaccttgtgatccgccagcctcggcctcccaaagtactgggattacaggcgtgagtcactgcgccccgccaatctcggctcactgcaagctccgcctcccgggttcacgccgttctcctgcttcagcctcccgagtagctcggactacaggtgcccatcaccatgcccggctaattttttgtatttttagtagaggcggggtttcactgtattagccaggacagtctcgatctcctgacctcacgatccgcccgcctctgcctcccaaagtgttgggattacaggcgtgagccactgcgcccggccaaattttttgtatttttagtagagatggggtttcaccatgttggccaggctggtcttgaattcccgacctcaagtgacccgccccgcctcggcctcccaaagtgctggaattacaggcgtgagccaccgcgcccagcctatttattttatttattttattactttttttgagacagaatctcactctatcgcccagggtcgagtgcaatggtgcaatatcggctcactgcaacctctgcatcctgggttcaagcgattctcctgcctcagctttcccagtagctagaattacaggcgcctgccaccactcccagctcatttttttttttaattttttttatttttagtagagctgaggtttcaccatgttggccaggctaatttcgaactcctgacctcaggtgatccacccgcctcagcctcccaaagtgctgggattacaggtgtgagccactgcgcccagccggcctatttatttatttattttgagacggagtcttgctttgtcgcccaggctggagtgcagtggtgcaatcttggcccactgccacctctacctccctggttccagcgattatcctgcttcagcctcccatgacttttttttgtttttttaattttatttttttctgagacagagcctcgctctgtcatccaggctggagtgcagtggtacaatcatggctcacttatagccttgacctccctggctcaagtgatcttcctacctcagccccctaagtagctgagaatgcatacgtgggcaaccagacccagctaatttgtgtgtgtatgttgtctggtttttttttgaaacagggtctcaccatgttgcccaggctagtcttgaactactcctgagctcaagtgatcctcccacttgagcctcacagagtcttaggattacaggcgtgagccactgtgcccggcccattgttttgactttagctactttctttttttttttttttcttttgacacagagtcttgctcttgtcgcccaggctagaatgcaatggcacagtcttggctcactgcaacttctgcctcccaggttcaagcgattctgctgcctcagccttcttggtagctaggattacaggcacctgccaccacgtccagctaatttttgtacttttagtagagacagggtttcaccatgttggccaggctggtctcgaactcctgacctcaggtgatcggcccgcctcagcctcccaaagtgctgggattataggcgtgagccactgcacctggcaattttcgctactttctgtcaatttcctgttcctttcccactcccctactttttggatgctcttgtaactatttattttctttttttttttttcccaagactgagtcttgctctgtcgcccaagctgaagcgcagtggcgagatctcggctcactgcaagctctgcctcctgggttcacaccattctcctgcctcagcctcccgagtagctgggactacaggtgcccgccaccacacctggctaattttttgtatttttagtagagacggggtttcaccgtgttagccaggatggtctcgatctcctgacctcgtgatccgcccgcctcagcctcccaaagtgctgggattacaggcgtgagccaccgcacccagccaactatttattttcaagcagagccttgctctgtgccccaggctatcatgcagtggcactatcatagctcactgcaaccttgacctcctgtgctcaaacagtccttctgcctcagtctcctgagtagctgggactacaggtgtgcaccaccatggtaatttttttgtgttgtcgtagggatgaggtctccctatattgcccaggttggtctcaaacacctgacctcaagcaatcctcccacttcaatctcccaaagtgttgggattacaggtgtgagccactgcacccagttaacttactatttagctgttgattagtgtctagactcagtaaagttagataataatttgtgtaagaatctcctttgtaataactggtctggcatcacagacaagcctgaaagaaatttgccagttttgtatccaatttcccaacataattgcaacatccttccagcccccccaccccccagaatatccactgctccttctttcagccatctctatttttctgctgctttcatcattaatgagttcaataacacctttgacatctgctcaccctgtttttgtatgagtcatgtttgtttgttctttgagacagggtctcattctgtcacccaggctggaggacagtggcacaatcatggctcactgcatcatggacctcctaggctcaagcagtcctcctgcctcagcctcatgagtagctgagaccacaggtcgtgccaccacacccagctgtttttgaatttttggtggagatggagtttcaccatattgcccaggcgggtcttgaactcctgaactcaagtgatctgccttcctcagactcgtaaagttctgggattactggcatgagccaccacgcccagcctggggacatttttttttttttttgagacagcgtcttgctctgtcgcccaggctggagtgcagtggtgggatctcggttcactgcaagctccgcctcccgggttcatgccgttctcctgcctcagcctcccgagtagctgggaatacaggcgcccgccaccacacccggctaattttttttttgtatttttagtggagacggggtttcaccgtgttagccaggatggtctcgatctcctctcctcgtgatctgcccgcctcggcctcccaaagtgctgggattacaggcgtgagacactgcgcctggccttttttttttttttttttttgagacagagtctcgccctgttgcccaggctggagtgcagtggtgggatctcggctcactgcaacctccacctcccgggtccaagcgattctcctgcctcagcttcctgagtagctgggattacaggtgcccaccgccacgcctggctaacttttgtaatttaagtagagacggggtttcaccatcttggccaggatggtctcaatttcctgacctcctgatctgcctgcctcggcctcccaaagtgttgggattacaggcatgagccactgtgcctgaccagggacacattttaaaagttaaaaacatgactcttagccaggtgcgatggctcatgcctgtaatcccagctacttgggaggctgaggcaccagaatcacttgaacccaggaagtggaggttgcagtgagccgaaatagtaccactgcactccagcctgagtgacagagcaagactctgtctcaaaaaaacagaaaatgtatacgtgtgtgtgtgtgtgtatatatatacacacacacacacacacacacacacatatccctgttttatttcatttttattatggggtttttgttgttttctgtttttgtttttgtttttgtttttgttttgagacagtcttgctctgtggcccaggctggatcggctcactgcaacctccacatcccacttccaagtgattctcctacctcaacctcctgagtaactgggactataggtgcccactgccacacctggctaatttttgtatttctagtagacagggtttcaacatgttggccaggctggtctggaactcctgacctcaggtaatccgcccacctcagcctcgggctattttttattgaagaataacatacgtacagaaaaagcatataatcacaggtacgcagcttgacacatttacgcaaagtgaatattctatgtaaccagcagctaaatcaagaaacagaaaattataagcagagcagagtccccgtcctgttcccatgtagtcactggtccttctaaagcaatcaccattctaacttctagctacatacataaatattctcttaatttgtcttaattttctcataaaaatggaatccataatatgtactcttttgtgtctggcttctttcattccacattatgtttgtggcatgtagttatatttcattcattctcatttctctatagtattccacagtgtgactaaactaggtattacatgattatgtggaatgattggaatgctctgacaccgctgcaactttaaataaccactttgcgctgtgtacagtggctcatgcttgtaaccccagcattttgggaggccgaggcagaaagattgcttgagcctagaggtttgagaccagtagggcaacatagtgagtccctgtctctacaaagaataaaaaaattaacaaaccatggtggctcacgtcagcagtcccagctacttgggaggttgagggaggaggatcacttgagtccaggaggtggaggttgcagtgagctggaaaacaaaacaaaacaaaacaaaacaaaaaacagaaaagaaaagaaatagcccctaagtggccagatgcggaatcccagcgctttgggaggccaaggagggcggatcatttgaggtcaggagttcgagaccagcttgacctacatgtcagaccctgtctctactaaaatacaaaaattagctggacgtggtggtgggcacctataatcccagctcctcgggaggctgaggcaggagaatcgcttgaatccaggaggcggaggttgcagtcagccaagattgtgccactgcactctagcctgggtgacacagccagattccttatcaaaaacaaacaaacaaacaaaaaatgcccctaactgggaactgcttaaatgtccataataaaagaagacaggggccaggcacggtggctggtggctcatgcctgtaatcccagtactttgggattcctaggtgggcagatcacttgaggtcaggagttcgagaccagcctgaccaacatggtgaatatccatttctactaaaaatacaaaaaatttagctgggcgtcatggggcatgcctgtaatcccagctactcgggaggctgaggcgtgagaatcgcttgaacctgggaggtggagattgcagtgagctgaaattgtgccactgcactccagcctgggagacagagtgagactctgccttaaaaaaaaaaaaaaaaaagaacagtgtattgtactgcacgcacatattttgtgcatctgctgggttataagacctaaatggtagagtcatttgcaccacatcctggacaggctagagaatctcctcttgctctgggctccaccggccttacagttcacttcgctgatgagtgagagcaggtctcccggccatgatacaagctgcccccaaaattccaaagggctttttcttaccaccttttccatcaaaggatgggggtataggggatgaaagtttcagtagcttgccctgtgtttagggaaaaaacaaaattctaacaaaactcttctcccggacctccaaaatatctctgggctggcaggtctctgtattttttttttttttattgaacttccttaaatgcacataagtcagctaatacttccatggtacctgtttctttctgctcttggtacatcgatattattattattataattatttaattattatgaaacaaggtcttgctctgtcgcccaggctggagtacagtggcacaatcacagatcactgcagcctccacctccttggctcaagtgatcctccagccttagcctcctaagtagctgagaccacaggtgcacaccaccatgcctgataattttttttttttttttttttggagacggagttgccctctgttgcccaggctggagtgcagtggtgtgatctcagctcactgcaagctccgcgttccgggttcacaccattctcctgcctcagcctcctgagtagctgggattacaggcacccgccaccactcccggccaattttctttcttttttttttttttttgtattttagtagagacggggtttcaccatgttagccaggatggtctcgatctcctgacctcatgatccacctgcctcagcctcccaaagtgctgggattacaggtgtgagccaccgcgcctggcccaatacccggctaattttgtgtgtgtgtgtgacgcagtctcgctctgtcgcccaggctggagtgcagtggcgctatctctgcttgctgcaagctctgccttctggcttcatgccattctcctgcctcagcctcccgagtagctgggactacaggcacccgccaccacgcccggctaatttttttttttgtaattttagtagagacggggtttcaccgtgttagccacgatggtctcaatctcctgaccttgtgatccgcctgcctcggcttcccaaagtgctgggattacaggcctgagccaccgcgcccggccaattttgtatttttagtagagatggggtttcaccatattgtccaggctggtctcaaactcctgacctcgtgatccgcctgcctcggactcccaaagtgctgggattacaggcatgagccaccacgcccagccagaattttttcttttttctagagaagggggtctccgtatgttgcccagtctggtcttgaccacctgaccttcattgattttcctacgtcggcctcccaaagtggtgggattacaggtgtgagccactgccaccggccagtaattatgctgatgaaagacctgttttttctccagttcctgggatggctctagggagggttatttacactgtgagtgaggaggcattcacagagaagttcctccagagtgtggaagaagcactaccatttggcaccaacgcctggagaacaaaggaggagaccattggccaaagagaggcatttccattttgttggaacctgctgaccaccaacccatagcattttttccctttcttccttgctaatccaatcgcagattcattgaggaggtgagaggtcctgagatccaggctggaagaggagtgattggtctacctggttctcaagggataatgttgccccctagaggacattttggaaattattaaggaaaattaacgactggttttttggttgtcatctggttctcaagggaacagtattgcttccttgggagaatttggaaacttaccttttttcatcgtcacaatggtgaagggtttgttactgggattagaggacaaggaccagacatgccaagatgttctacaatatagcattcctaattaataatcacctaatgaataaagctcagatagcacttaaaaagtggggaaaggactgtttatactaaattatgctaagctgtaacactgaactattccagttcttttgaaattgtttacatagcaaaatcatagttgactcctggccatttaagacttatgccaccactcttgggatagtgaaaatgttttgcaactagattgaggtggtgattgtataatatggtgaaagtactaaaagccactaaattgtgcacttcaaaatgctgcctaattttatattatgtgaatttcacctcaataaaaatgtctttttttttttttttttgagagggagtcttgacctgttgccaggctggagtgcagtggcgcaatctcagctcactgcaacctccacctctcaggttcaacccattctcctgcctcagcctcgcaagtagctgggactacaggtatgcgccaccacacccagctaatttttttgtatttttagtagagacagggtttcaccatgttgaccagcatggtctcaatctcctgaccttgtgatccacctgcctcggcctcccaaagtgctgggattataggtgtgagcccccgggcccagccaataaaaatgtttttttaaaaggatgcatatttccaaacatgagactataccatcacatttaatttttcccagaaactataaaaagtagaagtgaagagaggaaagggagacacttttagaccttcaatgagtctgcaagtacaggagaaaataatttatgcagcaattagctttattttcagggctctttttcttttcttttttttttgttgagacggagtctcgctcttttgcccaggccggagtgcagtggcgctatcttggctcagtgcaagctctgcctcctgggttcataccattttcctgcctcagcctcccgagtagctgggactacaggcacccgccaccatgcccagctaattttttgtatttttagtagacacggggtttcaccgtgttagccaggatggtctcgatctcctgacctcatgatccgcccgcctctgcctcccaaagtgctgggattacacgcgtgagccaccgcgcctggccaacaaagtgatcattttacaagagttatggcatagtcacaggtaagaacctgggtcactgggtcactccctaaccaattacgaattactatatgccatggaccttcaggattactttcttttttgttttgtttttgtttttttttttgagacagagtctcgctctgtcacccagaccggggtgcagtggcgcgatctcagctcactgcaacctctgcctcccggattcaagcaattctcctgcctcagcctcccgagtagctgggattacaggcatgtgccaccacgcctggctaatttttttgtatttttagtagagaccgggtttcaccatattggccaggctggtctcgaactcctgaccttgtgatccacccaccttgacctcccaaagtcctgggattacaggcgtgagccaccgcgcccagcccaggattactttctttctttcttttgagacagagttttgctcttgttgcccaggctggagtgcaatggcacaatctcggatcactgcaacctccacctctcaggttcaagcgattctcctgcctcagcctcccaagtagctgggattacaggcatgcggcaccatgcctaaaattttgtatttttagtagagatggggtttctccactttggtcaggatggtctcgaactcccgacctcaggtgatccgcccgcctcggcctcccaaagtgctggtattacaggcatgagccaccgtgcctggcctctatttttctttctataatccatgtacattttcctttaataatataaggcaactaaacagcactttattttcagaggcttatctaaaagatacttgacacagccctttgcagctgggtcattctctgaattctaaatgtcgtttcctgcacaaagtggttatttgatcttgtaactggcattttccccggagattaggaagtggcacaccaaagtgcaaaaaactttggaatcagaactttaatttttaatctttattttatttatttatttatttttgtgacagagtctcgctctgttgcccaggctagagtgcaatggcaagatctccactcactacaaactccacctcccgggttcaagtgattctccgccttcagcctcctgggtagctgggatcacaggcgcacaccaccacactcggctaatttttgtattttgagtagagatggggtttcaccatgttggccaggctggtctctaactcctgacctcaggtgatcctcccgtccatgcctcccaaagtgctgggattacaggtatgagtcactgtgcccggcctaatttttatatttttttgtagagacggggtctggctgtgtttgacagcctcaaactcctggcctcaagtgatcctctcaaagtgttgggattacagacatgagccacagtgcctggcctattgaaagcttttccatcataataggtccttccccccaatgcttgcagcaagtcaatagtaggagaccccaggttgcagcagagaaagaggtttaatcataggggccactgaaaaccaagagaggagatggaaggaaccacgaatccacttccccagggagttcggggctttttaagggttttggagtgggttgaagtgtggaggtcattggttggttgaagtgtgcagggtgaagtaatgaaacagggagttgaagaaactctattctcctgtcgatttggttcctctgcggggtcttcacactggttggtatcagctgttttgctggaattcaggatctgaaaaatatcttaagcttttttttttttttttttttttttgagacaaggtctgttgtccaggctggagtgcagtggtgccatcatagctcattgcagcctctaacgcctgggctcaaaggatccttccaccttagcctcccaagtagctgggattacaggcacgcaccaccacacccagctaattaaaaaatttttttttttgtagagacaggggtcttgtcatgttgcccaggctggtcatgaactcctgacttcaagtgattttcctatctcagtctcctaaagcgcatggattacaggcatgagccaccatgccgggcgctaagcaattcttattatttatttatttatttatttatttatttttttctgagacggagtcttgctctgttgcccaggctggagtgcagtggcgcgaactcggctcactgcaagctccatctcccaggttcatgctattctcttgcctcagcctcctcagtagctgggactacatgcgcctgccaccacgcccggctaattttttgtagttttagtagagacaaggtttcaccatgttagccaggctgatctcgaactcctgacctcgtgatccgcccacctctgcctcccaaaatgctgggattacaggcgtgagccaccacctccggcctaagcaattcttaaataaaaatctatgattccgccaggcatggtggctcacacctgtaatccgtgcactttgggaggccgaggcgggtggatcacaagttcaggagttcgagaccagcctggccaacatggtgcaatccctgtctctactaaaaatacaaaagttaggtgggcatggtggcttttttttttttttttttagacgggagtctctgtcatccatgctggagtgcagtggcaggatcttggctcactgcaacctctgcctcccaggttcaagcgattctccggcctcagcctcccaattggctgagactacaggcgtgtgccaccacgcccggctaattttttagtattagtagagatgggggtttcaccatcttggccgggctggtctcgaactcctgacttcgtgatctgccctccctggcgtcccaaagtgctgggattacaggcatgagccactgtgccctgccaaaaagcctatgattctaacatcagaaatccttccacctcagcctcccacgtagctgggactatagactcagtaccaccacaccaagctaatttttgtatttttaatagagatagcgtttccctatattgaccacctggggccatccctggttttttttttttttcccttccttccttcctttccctctctctttccctccctccttccttcctttctttctttctttcttttttttttttttttacagagtcttgctctgttacccaggttggagtgcagaggcatgatcttggcttactacaacctccgcctcccggattcaagcaattatcctacctcagccttccaagtagctgggactacaagtgtgagccaccatgccctgctaatttttttatttttactaaagacgggatttcaccacattagccaggctggtctccaactcctgatttaaagtaatctgcctgccttggccttccgaagtgctgagattacaggtgcgagtcaccgtgcctggcctattcctgttttcttaacgctcctctctcccactgggccgtgactgcctctaaggcagagatgtgttcatttttattattattgtatgtccagggctgggcacaaagtgcaacacatagtagggacatgaaaggctgggcacagtggctcatggttgtaatcccagcactttgggaggcagaggcgggaggatggcttgaggccaggagttggagaccagcctaggcaacagagggaccccatctctatgaaaaaaaaaaaaaaaaattgacagttcaatgtcacctctgataagccttccctgaccacccctgttactctgtagccccatgtcctgctttatttttctccaaagcatttatcatcgctgggtttatatttatttctcttcgggcttttctcactggatcgtaaactccatgaggacagggctttgtcgatttcactcaataccgttattttacaacatccctattgctgggatctcagtatgcactccttaaatatttgcagaatttaagtgccacataagtgaccacgtgggcaacgccctcggggccttaagccgcgccatttttggggctaggattggttggaccctccgtcacgtgacatgcagtcgccggatcgcctttgagtctcgtgaggtacttttggtcccaggctccgcggacgaggtactgcgcaggcgtgggagggtctgcgcatgcgcagaagcactccgggcgtgctgccggcggcggtaggtggcgcgcgggtccggcgggcggttggcttgagcgggaccggagctgaggcaggaagagccggcgccatggtggagaaggaggaggctggcggcggcattagcgaggaggaggcggcacagtatgaccggcagatccgcctgtggggactggaggcccagaaacggtcagggccggcgcggcttgaggccgctagggtctggagggggcgtctattctgaggcgtttgcggcccggaaggagcgggaaggtgtgatttgaagggaggaggcgggaattctgtgctctgggatcgtctctctcttggggggactggaggagttgattggggatgtttctggaaggtctgggaagtggttgggagggccgttccgaaggatgggagctctgaagggggcgttggggagtcctgagagagcgggagaattcaaactcaggaaatccgaggcccgaaagcggtgattgtggggtttgatcgcggttaggggataagaggggctggggatacgtggaaagggtgaggtgagggacgcagttcattcattcgagggtatgggacctggttccgtgctgcacacaggggagactggactggccaaccggacagacgggagcttacactcttgtgggagctcacgggcgggccagtctgagagaatgcgggttttgaggagttttggagcaagttatctcaaatgggaatcttgagaggctcggagaggctggagggggacggccgtaggctcccgaaaaggttgcttgtgtttggtatggggctgtgtcttgataggacaggagacgtagtttgggcattgtggagtagcttagggaattctttttttttttttttttttttttgagatagtctctctctgtcgcccaggctggagggcagtggcgcgatctcggctcactgcaacctctgcctcccggattcaagcgattctcctaactcagcctcccgagtagctgggattataggggcccgccagcacgcccggctaatttttgtatttttagtagacacggggtttcgccatattgacgagactggtctcgatctccttacctcaagtgatccacccgcctcggcctcctgaagtgctgggattacaggagtgagccaccgcgccaggacgtcttttgttttgtgcagttgggtgacctcggttcactgcagcctctggcctcccgggttcaagacttcctctcacctcagtcttctgagtagctgggattacaggctcgcgccaccatgcctggctaatttttgtatttttagtagacatgggttttcaccatgttggccaggctggtctcaaactccggacctcaagtgatctgcccgccacagcctcccaaagtggttggattacagacgtgagccactgtgcccagcttgttttttttttttttctttctctgtggcccagtggagtgcagtggtgggatcacagctcactgtagcctcaacctccaaggctcaagggatattccctcttcagcctcccaagtagctgggactacaggcgtgccccaccacatcatccgactaatttttgtttttttttttttttgtaggatggggttttgccatgttgcccagactggtcttgaactcccaagctcaagcgatcctcggcctcaagagatctccccccatctcagactcctaaaatgctgggattacaggcatgagctaccatgcctggcctcattgatcaatatttttacttagcctggacgcagtgactcacacctgtaatcccagcactttgggaagctgagttggggggaggggacctcttgagcccaggagtttgagactagcctgggtaatgttgccaaacccagtctctacaaaaaaatacaaaaattagccaggcatggtgacataagtttatagtcccagcttgtcaggagactgaggtgggagcatcacctgagcccctgggaggtggaggttgcagtgagccatgatcacaccactacaccccagcctgggtgacagagtgaggccccgtctcaaaaaaaaaaaaaaaatccacaagcgtgtgtatatgtgtcagttattaaaggatggtgaagtgagagggttgttttgataggttggccagggaagggctctgaagaggtaacattgagcctcagacttatatgggaaagagccctgtggtcatctgggagaactttcctagctaagagaacagcaagtgcaaattcccagaggcccaggcatgattgtcaaattagagaaataaggtggcaggaaccaaatgatttgaggagtagcttttattctaagtgtgtgggaaaacctgttggagtgttttgagtgtgggagtaacatgatctgttttttgtttgttttttgagacggagtcttgctctgtggcccaggctggagtgcaatggcacgatctcggctcactgccattgcagtgaatccgcctcccaggttcaagcgattctcctgcctcaccttcctgagtagctgggactatcggcatgtgccacaacacccggctaatcttgagtatttttagtagagacggggtttcaccatgttagacaggatagtctcgatctcctgacctcgtgatccgcctgccttgggctcccaaagtgctgtgattacaggcgtgagccactgcggcctggcctggtttgtgttttaaaatgatcgctccagaataggttaaagtggtcagaaatggaagtaaagattctggctggactgttgcagtaatccagttgagataaaaatattggtggcttgaaactcaagagaaggggtcaaataaatatattctggatatattttgaaggtagaagagggaacagaatttggggcagaagtccaggatgacaccactgtttttggcttgagcacctacctggaacgatggaattgccattttgaaagatatggagagctgtaggtttggtggggtcggggaagagtcagttctcttttaggtttcagatttgttttttttgtttgttttttttttttttgagacggagtctcactctgtcgcccaggctggagtgcagtggcatggtctcggctcactgcaacctctgcctcccaggttcaagcaattctcctgcctcagcctcccgagtagctgggattacaggcgcccgccaccatgcccagctaatttttgtatttttagtagagacggagtttcaccgtgttggtcaggctggtgttgaacccctgacctcgtgatccacctgcctcggcctcccaaagtgctgggattacaggtgtgagccaccatgcccggcctcagatttgtttttttatacaactaagtagaaatatgtgaggggttgagttcagaggtaaaatttgggtgatggtgggtattgtgtgagtacagagtatagaattaatggaggggttggggaggcagacacgtcaggagaatttagtttgagggggtgggagctttcagaaggttttagagggtgcagtggtgggatgggaattacctcaggctcatttcagatctgtggggtcttctttgatggggtggggggatgtcatcatgaggcattaacattggtgggagggttgaaggcacctggaatagattgggaattaagtgatgagaatgtgcctctggacataggtggactgcattgattttagggactgctattttctggatggagtggaaagaggatttatgtgagttggaggaaactttgaggaagcttggtgtgttctgagatcctaaagggttggggaggggattctaaggtactggaagggttaatcgaaggggtttgcggcagcagatagctttgtttgaagtggggcaaagttggtgaggtttaaactggaatgtagttagggaactttcagagggatggggatgatttttctgagaagcagtgaagaatggatgggggcctctgagtgggagatgacctaagggacaagtcagggtcagggcatggaatttgtgggaggtaggaattattctgagggagtggagctgtaccaaatttggtggagaacatgaaaaggattggctgggggttgcaggagggagggaagaggttgtttgtaatttgtactctatttttagacagtcttagagagtttattaaagtgttttttgtccattttcagccgaggtttttagaaattaaaaatttttttgtgtgagtacatagtaggtgtatacattttgggggtatgtgagatactttgatacaggcatacaatgggtaataatcacatcagggtaaatggggtatccaccaccttaagcacttatcctttgtgttacaaacaatccaattatattcttttagttgctttgaaatgtacaacaaattattgttgactgtagtcaccctgttatgctatcaaatactgtatcttattcattgtatttaattatatttttgtatccattagtcatccctccttcccctccaccccccactacccttcctagcctctggtaaccctcagtctactatctgcatgagttcaattgttttaatttttttagttcccacaaataagtgacagcgtgcaaagttttctttctgtgcctgatttatttcacttaacataataacatccagtgccctccctgttgttgtaaatgacaggatctcattcccttttttttgtagacagggtctctctgtcgcgcagactagagtgcagtggtgtgatcacaactcacttcagccttgacttcttgggctcaggtgatcctcccacctcagcctcccggtagttgtgactatagcacgtgtcacaagcccagctaatattttagtacaggtggggtttcaccaggctagtctccaactcctgggctcaaataatcctcctgcctccctgcaaagtgctgggattagaggcgtgaacagcaatgcccagcctttgtaccacaatttctatttttttttttgaaacggagtctcgccgtgtcgcctaggctggagtaggctggagtgcagtggcgcagtcttggttcactgcaagctccgcctcccaggttcacgccattctcctgcctcagcctccctagtagctgggactacaggtgcccgccaccacgcccggctaatttctgtatttttagtagagacggggtttcaccttgttggccaggatggtctcaatctcctgacctcgtgtaccacaatttctttatccatttgtctgttgatagacatatgggttgctttcaaatcttggctattgtgaagagtgctgcaataaacatgggatttattgcagttttttttcttttgagaccgagcctcgctctgttgcccaggctagaggacagtggcacgatctcagcccagtacaatctccacctcccaggttcaagcgattctcctgcctaagcctcccaagtagctgagattacaggcacctgccaccacgcccggctaatctttgtattttttagtagagatggggttgctgtgttggccaggctggtctcaaactcctggcttcaggtgattggccctccttggccccccaaagtgttgcaattacaggcgtgagccaccacacccagcctgatttattttcatttgggtatatacctagcagtgggattgcatttttacccgagtcttttttttttttttttttgagacggagtttcgctcttgttacccagactggagtatggtggcgtgatctcagctcaccgcaacccttgcctcccaggttcaagcaattcttctggttcagcctcccaagtagctgggattacaggcgtgtgccaccatgcccggctaattttgtattttagtagagacgggattcctccatgttggtcaggctgtgaactcctgacctcaggtgatccgcccgccttggcctcccaaagtgctgggattacaggcatgagccacagcccccggccttcacctgagtcttatagcagctctctggagtcggaagggcagtgatttccttctctgttcagatgaggaaggaggctccacagagcaaattgacttgcctctaagagggctctaggtgggataggagggttctaggtgggataggagaactctggagactggagttcctttatgaaacagaagccctggaaatgggcaggctgataaaatgtacaaattgtggggcattttataagacagttatcctacttctcttccaaaagtcagtttcatgggaaaaataagtgaagggactgttgtggattaaaagagagtaaaggccgtcacagtgactcagcctgtaatcccaggactttgagaggccgaggtgggtggatcacctgaggtcaggagttcgagactagcctggccaacatggtgaccgtctctactaaaaatacaaaaaaaattagccaggtgtggtggtgggtgcttgtaatcccaactacttgggaggctgaggcaggagaattgtttgaatccaggaggcagaggttttagtgagccaaggtcacactatcgcactccagcctgggtgacaagagcgaaactctgtctcaaaaataaataaataaaataaaataaagtaaagaagcagcttcctagagcagatttggttgcttaaattgaggccaagtttctggagtttttattgatagttgacaattacaactaaaatttttttttctcgctctgttacccaggctggagtgcagtgacgcagtgacgtgatcttcagctcactgcaacctccacctcccgggttcaagggattctcccgcctcagcccccaagtagctgggaccacaggcgtatgccatatcactcagctaattttgtgtgtgcatggcgtatgccgtaacactcagctgattgtgtgtgtgtgtgtgtgtgtgtgttgttttttttttttttttgtgatggactctcactctgtcgcccaggctggagtgcagtggcacaatcttggctcactgcaacctccgcctcctgagttcaagcgattctcctgccttagcctctggagtagctcggattacaggcgcgtgccaccacacctggctgatttttatatttttagtagagacggggttttaccatgttggccaggctggtctcaaactcctcacttcaagtgatctgcccacctcggcctcccaaagtgctgggattacaggcgtgagccactacacccggcctatgtgtgtgtattttatttttttatttttttgagacggaatttctctcttgttgcccaggctggagtgcaatggcgtgatctagactcactgcaacctctgcctcccgggttcaggcaattctcctgcctcagcctcctaagtagctgggattacaggcgcctgctaccgcgcccagctaatgtttgtatttttagtagagaccaggtttcgccatgttggccagggtggtcttgaactcctgacctcaggtgatctacccgcctcagcctccttaagtgctgggattacaggcatgagccactgcgcctggccagaagttaccttctttgtgcctgttttctcagctgcaaaagaggggtaacaaagtgccagcccattagattgtcatgggaattaaatgacataatacatacaaagagcttagtagaacagtgcttggcacatagtaagtgttagataaatgttggccattattattttattatgtaccagatttctataattctgctgatggacacaggtttgttttggtgtgtctattaattcacagccatttgagtaacagtatgtcctaaatgccaaggaagttactggttctagtgatacagtggtttctggagtttacattctaatggaggagggggcagtaaacatataaacaagtagtgtagcttagcacagtggtgtgtggctgtgatcccagctactggggaggctgaggttggaggatcacttgagccaggcaattgagactagcttgggcaacttagtgaggccccatttcaatcaaaacagtgggcaacacagaccccatcttaatcaaaacaaaaacaagtagcataattcgagatagaagaggatgtggacctattttaaattaggtggccagtatggacttctctaaggaggtgacaattgagctgagacctaaagaatgtgtcccttaagaagttgagggaagaagcaatgggaagcactaatgccaaggtcctaaggtgggagcaaggatgggagcaaggatgatgttctctaggatcagcctcccgagtagctgggactacaggcacgtgccaccacgcctggctaatttttgtattttgagtagagatggagtttcaccatattggccaggctggtctcgaactcctgacctcaagtgatccgaccgcctcggctaattttgtgtatttttagtagagacggggtttcaccgtgttagccacgatggtctccatctcctgaactcatggtcctcccaccttggcctcccaaagtgctgggattacaggcgtgagtcgccgcgcctggcacacccagctaatttttttttgttttgtacagatggagtcttactttgttgcccaggctggtttcgaactcatgggctcaagtgatcctcatgccttgccctcctaaagtgctgggattacaggtgtgacccactgcgtccagcctgctgtagttttgtcggagagaaacgatggtggctcagactagagtggtgtttgtggaacttgagggaagtagatggacaatgctgctgtgaatgtgtatctttttttttttttttttttgagacagagtctcactcttgtcacccaggctggagtgcagtggcgcgatctcggctcactgcaagctacaccttccgggttcacaccattctcctgtctcagcctcccgagtagctgggactacaggcacccgccaccactcccggccaatttttttttttttttttttgtatttttagtagaaacggggttttaccatgttagccaggatgatctcaatctcctgacctcgtgatctgcccgccttggcctcccaaagtgttgggattataggcgtgaggcaccgtgccctgctgaatgtgtatcatttttgtgcccacttgggtatttctttttttttttttttttttgagacggagtctcgctctttcgtccaggctgaagtgcaatggtgcggtctcggctcactgcaacctccgcctcccgggttcaagcgattctcctgcctcagcttcccgagtagctgagattacaggcgcctgccaccactcccggctaattttttttttttttctttttgaaacagacccttgttctgttgcccaggatggaatgcagtggcgccatctcggctcactgcaaactccacctcccgggttcacgccattctcttgccttagcctcccgagtagctgggactacaggcgcccgccaccatgcccagctaattttttatatttttagtagagatagggtttcaccttgttagccaggatggtctcggtcttctgacctcgtgatctgcctgtctcggcctcccaaagtgctgggattacaggtgtgagccaccgtgcccagcccacgcccggctaatttttgtaattttagtagagatggggtttcaccatgttggccaggctggtctcgaactcctgacttcaggtgatctacccaccttggcctcccaaagtgatgggatttgtaaacccagcactttgagggaggcagaggcaggaagattgcttgagcccaggagctggagatgagcctgggcaacatagtgagaccctgtgtctacaaaaaaaaaaaaaaacccataaatcagccaggtgcagtggtgtgcacctatagtcccaggactcaataggccgaggtggcgggatcacttgaacctgggaggttgaggctgcagcgagccctgatcttgccactgcccttcaatctgggttcacagaatgagaccctgtttcaataaaacaaaacgtaaacatggtatttggtgttgatggcagttgagtatttaatttaatttaatttaattttttttgagacggagtctgtcacctgggatggagtgcagcggcacagtcttggctcattgaaacctctgcctctcaggttcaagcgattctcctgcctcagcctcccaaatagctaggattacaggtgcccgccaccaacatgcccagctaattttttttttttaaacagagtctcgctgtgtcacccagactggcatgatctccgcttactgcaacctccgcctcccaggtttgagtgattctcctgcctcactgtcccgagtaactgggactacaggcgcctgccaccacgcctggctaatttttgtattttctgtagagacacggttttgccatgttagccaggctggtctcgaacccctggactcaagtgatctgcccgccttggcctcccaaagtgctgggattacaggcgtgagcccccacgcctggccataattttttttgtatttttagtagagagggtgtttcaccatgttggacaggctggtctcgaactcctgacctcaggtgatccacccatctcagcctcccaaagtgctgggattacaggcatgagtcaccgggcccggctgaataatgaattttaaacaactgcagagcagtctgtagagctatgtaggaatgtaggtcgtggagagcagatttattgtcagggactttttatatgtagctgttgctggaagagttcggggagggggagtgcttgctggtattgactcagccatgataaaaaagcctttttttgaggaaatggcattggagttgggttttgaaggggaaaggcgtaggtaggcattgagaggaagaaatggtgcattttgcgagggtggaatgttgtgattaaattttatttaatttttaattaaattaatagcaaactcttaccagcagaacttaaattgtgtgaaaattattcttagttattactaaatccttttcagtatgaataatacatttgctgcagaattattaatgagtttggttacatgatgcagcccaagatcttgatgagttgtttcataatacatgatgtaaagtctgtatttcctttttgaaatctgaaaaaattgtgactctgaaatacttctggttcaagagatttcagataagatatagttgacctattctgcttcctactgacctcagagaagtcttgggatggcctgacctctgattgccttttttcagcctcatcttctgtcactttacagatttaaaaagctaaaaacaaggctgggcacggtggctcatgcctgtaatcccagcactttgggaggctgaggcaggtggatcacttgaggtcaggggttcgagaccagcctgaacaacatggtgaaactccgtctgtaccaaaaatacaaaaactagccaggcgtgacagtaggcgcctgtaatcccagctactcgggaggctgaggcaggagaattgcttggacctgggaggcggaggttgtagtgagctgagatcacgccactgcactccagcctgggcaacagagcgagactctgtctttaaaaaaaaaaaaaaaaaggtaaaagcaattcctgtgtacatgctcttttcatgccaccatgtgttttgcttgtgtgttatacttaactagtgcctcttctcagcacctcttctgctgtcatgctagtttgagccaccatcatcctccctcaccttaactgtgacatcttcctacccccatggctttccatcatgcctcgaagaaaatccagaatccttccattgcatgtaagagccttcatgatgtggccccttgttccaacttttcagcctctctgtcattcctgtccctagaacatgccaagcactcctgcttcagggcttttgcatttgctgttttctctatctggaatgttctgctgccaaatatctgtgtgtttgtcctttatttcattttgatttttgctcatatggcatctcctcagaaaggcttgtatgatttctgtctcaaatagcgttctccatcattcttgattcttgtcacacttgattttcatcactttttcacatattatgtatctatttgtttatctgtctcctactttttcatgagggcagggactatgtctgattcaccgccttatttccacaccatagaaggatgcctggcatagttggtactcaataaatatttgttgaatgaattgttttgtgcagtatggattagagcctgtctctttcctagattcgaggtgtgatgcctcaatgcagttagaaccaaaatgatttttttttttttgagacggagtctcactcttgttgcccaagttgaagtgcagtggcatgatctcggctcactgcaacctccgcctcatggtttcaagtgattctcctgcctcagcctcccaagtagctgagattacaggcgcctgccactacgcccagctagtttttgtattttagtagagacggggtttcaccgtgttggtcaggctggtctcgaactcctgacctcaagtgatccgcctatctcagcctcctaaagtgctgggattacaggcatgagccaccgtgcctggcaaaccaaaatgatttgtgtattttttgttcttctgtgattctgcaagctcactgttctgtatcatcaggttaacaatgtttgtcttacaggctgcgggcctctcgggtgcttcttgtcggcttgaaaggacttggggctgaaattgccaagaatctcatcttggcaggagtgaaaggactgaccatgctggatcacgaacaggtgcgctgttgtgagctcattcctcccctgctctggctcccctttccagcatgaagatctgcagattttgtgagttcctccttgtgccttaagggctgtgaaaggagggctaacattaataaaccattgcctctggagactgaaggtgctattgttgggtttgaattctagctccaccacatctagctggatgagcagtagagactcacaccccctcattgagcttgcctgcctgtaaaatggggttagtaatatctcccttggtggttgcttgtgaggaggtgtagagaagtgtttttccaatttgtgcctaaaaatgacctgagtgactaactgaaaatgcagagtggcctggaggcttcgtggtgccctagctttcacccctagtgattctcatttaggtctgaggcgagctcaggagtatgtgcatttaaaaggtgttttagggctggacgcagtggctcatgcctgtaatcccaacactttggaaggctgaggcaggcggatcatctgaggtcaggagtttgagactagcctggccaacatggcaaaactctgtctgtactcagtatacaaaaattagccaggcatgttggtgtgcacctgtaatcccagctactcgggaggctgaggcacaagaatcgcttgaatctgggaggtggagtttgcagtgagctgagatggcaccactgcactccagcctgggcaacagagtgagactttgccttaaaaagaaataaattaatgaaaggtgtttcaggagattatgatttagatggtccacagacatcactttaaaaaacactggatcaggccaggcacagtggctcatgcctgtaatcccagcactttgggaggctgaggcgggcagatcatgaggtcaggagatcgagaccatcctggctagcacggtgaaaccccatcactactaaagacacaaaaaattagcagggcttggtggcgggcgcctgtggtcccagctactcgggaggctgaggcaagagaatggcgtgaacctgggaggcggagcttgcaacgagccgagatcatgccactgcactccagccttggcaacagagtgagactccgtttcaacaacaacaacaacaaaaacaaacaaaaacaaacaacactggatcagagagaatgtgggcagactgctttgtatagtgcttgaacctaacaagtatccagtaattaggaataatgatctgacatgctgtttgtttgtttgtgtgtttttgcgagacgagtcttgctgtgatgcccagactggagtgcaatggcgcaatctccgcacactgcaacctccgcttcccgggctcaagtgattctcctgcctcagcctctgaagtagctgggattacaggcacgcaccaccacgcctggctaagttttgttttgttttttttttgagacggagtttagctcttgttgcccaggctggagtgcaatggcgtgatcttggctcactgcaacctctgcctcccaggttcaagcaattctcctgcctcaatctcccgagtagctgggattacaggcatgcaacaccatgcctggctaatttaacgtttttagtagagaccgggtttctccatgttggtcaagctggtcttgaactccgacctcaggtgatcctcccacctcggcctcccaaagtgctgggattgcaggcgtgagccaccgcacccggccatgcctggctaagttttgttatttttagtagagatggggtttcaccatattggccaggttggtctcgaactcctgacctcaggtgatccgctggcctcggcctcccaaagtgcggtgattacaggtgtgagctaccatcccctgctgacataatgctgtttgattaatattataatggtagagcccaactccaatgtagctttctctgaccaggctcatcttcaaggtgaaaataagtgctgctctctctacattcccatgcctcagtgacattttatttattttatttatttattttgagacaaagacttactctgtcgcccaggctggagtacagtgacacaacctcagctcactgcaacctctgcctcccgggttcaagcacttctcctgcctcagcttccctagtagctgggattacataattacttcatctggttgtaagaatccaacattggaggccaatcacagaacagtgcgattctgacaccacaggtgtgaggccactgcacccatcttagagcgtattatgtagtttacattcaacaagcatctgagagcacctactgggtgccctgaagtctgctaggtgctggtgatagaaagatgctcacggtttggttcccattctcaaggtttttttttttttttttttccggaaaccatagcaggctccctgactgaggttgtggtacatgaaagatttcctggagtcctgatctgagctaagtcttaaagaacaaggagggttgtcaagataagagcctgtgttttaggcaggggacatagcagtgtcacaaaggcaccctacagtgtggtagaaatggaagctaaaagtagtttggtgtttttagagtgtgagacccaaagtggtgggtagggacaggttgctggtgaagtccaagtcaggaggggctcctaggaagccccactgtaagcttttacttaatcctctgggtggtgcagactcactgaagagtttcaaatgacaggaagggtgacatggttagctttgggctttatgtgtagatcagtaattactgtataaactatggttggcacaaaatacagggcagaagaccacttagaaggcagtttttagtagtttaggtgagaggtgaaagtggccttgctgatagggatggcaggaagcacacagatgtgagaaatagatttaggtggtagaattgggaggtctgtgtatgggagcttaaggaaagccaggaataaccagagcagctgacactgaaggggctaggcactgttctcagagctgcagttgtattatctcattgagtcctcacaacacatctgagatcaaggacccattaccatccctgttttacagatgggaaaactgagtaaaaggaagaaaagtactggcccatccaaggccccagtagttagtggtacggccgggacccaggcatctgactccagagcccatgttctcagccacctcactatggaccactctcatggaaatagcaaggatatgaagatgaggcttctggcttgagtgactgggtgggtggctggtggactccggagacagcacacagaagcaggcagacatgtagggtttatggatatctgagagaaaacggctggtgggcagtacagtagagaagactcaggtggatcaggaagaaatctgcaccagaaagagtgatttgaaaaataacagcagattttggtagaaactgaaagaggcattgagttggtttatggagctatacagagtggaaagataagtaattctgagatggaagcttggggacagccacacctaagagggcccaaattgagactagaatgtgtagcacgagaggagagcaaagcaaggaaggtgtgatctgtggactgatagtgatgaaatgataattgtatgtgtatgggttttttttttttttttttttttttttttgaggcagtctcactgttacccttgccggaatgcagtgggcatgatcatggctcactgtagccttaacttcctgggctcagggtattctcccacttaagcctcccagtagttgggactacaggtgcacgccaccacacctggctaattttttgtattttttgtagagactgggtttcatgattgttgctcaggctggtcttgaactttctgggctcaattatatgttttttttgtttgtttttttgagatggagtctcacttgtcgcccaggccggagtgcagtggtgagatcttggctcactgcaacctccgcctcctgggttcaagtgattctcctgtctcagcctcccaagtagctaggattacaggcgtgtgccaccacacccggctaatttttgtatttttagtagagatggggtttcaccatgttggctaggctggtctcgaacttctgacctcaagtgatccacccacctcagcctcccaagctgctgggtttacaggtgtgagccaccgtgcccagcctcaactgtatttttttttttttttgagacagagtctcgctctgttgcccaggctggagtgcagtggcgcgatcttggctcactgcaagctctgcctcccgggttcacaccattctcctgcctcagcctccctagtagctgggactacaggcgcccaccaccacgcctggctaatttttttgtattttttagtagagatggggtttcaccgtattagccaggatggtctcgatctcctgacctcgtgatctgcctgccttggcctcccaaagtgctgggattacaggcgtgagccaccacgcgtggccctcaactgtacgtttttatccatgtcctcgttttatatgggattcccacattcttgctgaggttcacacagttgttgagccaggatttgaatcaaagattgaatccagcctgaattatttcagagccttactgttaaccattgtgtggtacagcttctcagcacataatgagatccctgaagaagcaggatggaatgggtcaaggatacagggttagcctagaatgggaagtgggccagctcattttcttggaggagaaggtagtaagatagagagtgtgctgtggatggttggtaggaggtgttgaggggagattacttctgttgtacctagtcttggtgaaggtggcaaggttatttgcagagattaatggttaaattagatgtttgatgtgtgaagaaatactttgagagcagtatggaatctgtaatcttactggtggctattaggggattatattatcctgtctttgaggctctgctctgctgatgttcagccttaggggtgaaataattcctctgttccagtccccactcatctctccacctctctgagttctttttttttttttttgagacagagtctcactctgttgcccaggctggagtgcagtggcacgacctgggctcaatgcagcgtctgcctcccaggttcaagcgattctcctgcctcagcctcccgagtagctggaattacaggcgtgtgccaccacgtccggctaattttgtatttttagtagagatggggtttcaccatgttggtcaggctggttttgaactctggacctcaggtgatctgcctgcctcggcctcccaaagtgctgggattacaagcgtgagccaccgcacctggccatagtctatctatgttttttaaaagttcatttcaagcattcttaattgtgtctgatttttgcacaagtttgattttttttttaagttttctcatgaggttgcaatttttgttgttttttgagagagggcctctctgtgttgtccaggctagtcttgagctcctggcctcaagcagtgatcctcctgctttggcgtcccaaattgctgggattacagatgtgagctactgtgccaggctgcactggtctactttttttttttttttttttttttttgagacggagtcttgctctgttgcccaggctggagtacagtggtgcaatcgcagctcactgcaacctccgcctcccctgttgaagtgattctcctgcctcagcctcctgggtagctgggattacaggcacacaccaccacacctggcttatttttgtatttttagtagagatggcatttcaccatgttggccaggttggtctcaaactcctgacctcaggtgatcctcctgcctcggcctcccaaagtgctgggattacaggtgtgagccaccgtgccctgcccacactggtctagttttaaaccactggaagacagagatttaatcctttaaactacttgtgtatttccccaaatgcttatagttgggcacatgctaagtatttagtcaattcttgccactgttaatcagtcatttgttagcagttacaaatttgcatagaagaagaaagcatggatttttttgttgacagtgaattttctttataaacacaagggggtgctctttaaccatcaatgaccagtttaaaaaaagtttaaagtcattttaaagccttagaaggaagcctgcataaggcaaattgctacaggaacagtaatacattttagggctgtgcacagtgtttcatgcctgtaatctcagcactttgggaggctgaggcaggcggatcacgaggtcaagagattgagaccatcctggcaaacgtggtgaaaccctgtctctactaaaaatacaaaaattagctgttgtggtggtgcgtgcttgtagtcccagctacttgggaggctgaggcaggaggagaatcatttgaacccaggaggcggaggttgcaatgagccgagatcatgccactgcactccagcctggtgacagagcaagactgtctcaaaaaaaaaaaaaaaaaaaaatttaggtggtaggtattttagctatcctttaaaatttaaagattctttttaagatttattttccctaaaaatacaagacttaaaaaaatatgtgtattattcctaggtaactccagaagatcccggagctcagttcttgattcgtactgggtctgttggccgaaatagggctgaagcctctttggagcgagctcagaatctcaaccccatggtggatgtgaaggtggacactgaggatatagagaagaaaccagagtcatttttcactcaattcgatgctgtaagtttcttattataaaatctgctgtgggaattaaacaaattaaggtgctagttgtatatactttcaaatcccaaagcaatctgagagcattcaaatatcaaattctgagctttttcccaagaaaatgtataagctgttctattgtttaggcttagtatattgtgtgaatgtgttgctagagaggtccagtctgttgcatctgctgtagttgttggtgacttgctgtctgctggcttcttctctgggcatatgttccctcagccaggtttcgtctttggtgttttgtcttccttccagaatctttgcacataactttaatccatgttattgcaaatgttttcttccgaaaacttaacaagttggtgattaatttctgtggcagcggcatttttttgttagaaatatcaaactacagcttgtgttttgtcttaagaaaagcacacctgatcttgatctatgtctgtctgtctgtttctcacagtcacattgaccatgttgccatggataactagagaaaaatcactgtagtcgtaagtcaaatgaggcatatccagcctcatttagtttcactgccaaatctatgcggaggtgaaaggataaattctttgtcaatatctgcaacctttcagacatagttccctgcattctggaaaagcttaacaaatcttgataaatgtgaaatagtcatagatgagctactagttttttaaatgaaaggccccagtatgttacatgagaggttagaatttgggttgggtagttttttttttttgcacctttttttatttgagatggagttttgctcttgtcgcccaggctggagtgcaattgtgcgatcttggctcatggcaacctctgcctcctgggttcaagtgattctcctgcctcagcctcccaagtagctaggattacaggcactcaccaccatgctgggctaattttttgtatttttagtagagatggggtttcaccatgttggtcaggctggtcttgaacccctgacctcaggtaatccacctgcctcggcctcccaaagtggtgggattacaggtgtgagccactgcacctggcctgttttttacacttttctttctttctttctttcttttttgagatggagtctcactctgtcgcccaggctggagtgcagtggcatgatcttggctcactgcaacctccgcctccctggtttaagcagttttctgcctcagcctcccgtttttacacttttctatttcatatgtgcatctgttcaaatatgggcttggaaggatggatcatctgtgcatttgtcctgttttctttttcctagtcccttctattttttaacttgaggtattgggacactttccatttggacataagtcttcattttcttatctgtagtaaccacatttattttatgccaggtgtcccttgaacttgtagagttagagggtttgttaaaactgaagtgtgaggccagttgattgtgtaatgcgtgtgcatggggccatgttgaccgccttgcaggccgtgtttggctggtccttgcaggttttatagttactttagactctgcagggttccatttgatcaattggttgcatgttcacctgtggatttcttactttttagatgggatttttccttgggtggctgcattctttgaaacaccaaaggaacacatttctctgtgagtgttatttcggtattcaggctgctagacaacagcaaagagggtctatcaagtgaaaatgtccttttgttcaggagaaagcatgtgcaatttggaagttgtcttttgaccatgatcacaaagcttctcccgaaaagatggtattttgtgcagtagaacttagccatttccaatacctcaacttactggaatacaacctggaggccccagagcaacactgataattccactgagtggatcaccagttcattgtctaagcctgaatggaaggtcacttggtctgtaaccttttcttttgtccttaaattcagataaagtttcacaccgcaatctgtggaaaaatgatctcaacaggacttgtttatcttctttatcttaacatatcaatcaaaaggaggggggtaaaaagcccttgtatttaaacatgacctttgggtcaatttaaaaaactggttttgcttgtccctgtagcttatttggattttaatagatttagcagtatagaaacaacttgctaagttattttttttatgagaactatgaaatgtgtatatgttcgtggattacagaaaacatttgttgaatggcttttactttttagctaaacacattttattttggctgcagaacgtgacggtctcataacttatattttctacacattgaaacctgcaacttttcttttgtcttctagccatagggcccaaagaacctgttgtaccagtttgaaacatgctttgagcatgcccagagagactgttcattaagatttatttagacatcagggcagtgattcacagtttgcaaaactcaaacccagccaatttctttctttctgcaggtgtgtctgacttgctgctccagggatgtcatagttaaagttgaccagatctgtcacaaaaatagcatcaagttctttacaggagatgtttttggctaccatggatacacatttgccaatctaggagagcatgagtttgtagagtaagtgttgggagaggaggggagaacataacattttctcctttttatactttttttttttaaattatgtatttatttatgtgtagagacaggatctatgctatgttgttcaagctggtcttgaactcctgggctcaagtgatcctcccaccttggcctcccaaagtgctgggattataggcatgatccactgcgcctggtctgctgacatgttttcaagttgagagatagtaaaatgattacaaaatagttgggcgattctggaggcatattcaaccaaagtctaccttggaaaaggtgtccaatatccagagagactcctctggtagaacaaacagacctcatcctctcattttgaacactgaggctgcagaacttggtaattcttacatgacaggacttgccgtgttttgactttgtagtctctaggtgaaagatggcagatgatacattattgtaaaactatatgagttaggtattttggctgcagtttctgaccaccccctccaaaaccctccaacttgctaattgagagggaaagacaggctctgtgagataggagcttcctaccaagagactgagaactcttctcttgttcagcctctcaggcaagtcactgaaatttctctggtctccaagtttcttgcctgtaaaatcaagatgggggaaggacagtcatgttccagacatctcctaactctagtgttttatggctttaggataatctagttctttgggcatattattattattattattttattttttgagacggagttttgctgttgttgcccaggctggagtgcaatggcaccatctcagttcagaacaatctctgcctcctgggttcaagccattctcctgcctcagcctccggagtagctgagattacaggcatgcgtcaccatgcctggctaattttgtatttttagtagagacagggtttttccatgttggtcaggctggtcttgaactccggacctcaggtgatccacccacctcggcctcccaaagtgctgggattacacaggcgtgagccaccgcacccggctattattattatttttgagacggagttttgcttttgtcacccaggctggagtgccatggcacgatcttggctcactgcaacctccacctcctggattcaagtggttctcctgcttcagcttcctgagtagctgggactgcaggcacccgccaccatgcccggcaaatttttgtatttttagcagagacggggtttcactatgttggctatgctggtcttgaactcctgacctcaggtggtccacccacctcagcttcacaaagtactaggattacagccaccatgcctggcttctttgggtatattataaagaagttatagtagtgggaagcaatccagattattttaacataagctgcccacagcagaggggcagaattaagtttggcttttttttttttttttttttttttttttttctgagacagactttcactcagttgcccaggctggagtacagtggcgtgatctcagctcattgcaacctcctcctcctggggtcaaccaattctcctgcctcagcctcccaagtagctgggattacaggcgcccaccaccacgcccggctagttttttgtatttttagtagagacggggttttgctatgttggccaggatggtctcaaacccttgacctcaggtgacacgcccgccttggcctcccacagtgctgggattacaggcgtgagccactgcacccagccaagtttggctatttatttcatgattcaagtagagtgtttacaaagtaatcactttgatttattgagagcagctgtgtgcccagcagtgtgctgagcaacttacgctgctctgtttttcccacaataatttcctgagtgcccaacagtgtaccagactcatcatgttatcaatggcagagctcgatttgaaccgagatctgactccaaagcttttgcccttaaccaccatcccgatctgtgacctggagaggctttttttgattccaataacatgattcctagggtaaaattacattctctccccttgtcaccctctagggagaaaactaaagttgccaaagttagccaaggagtagaagatgggcccgacaccaagagagcaaaacttgattcttctgagacaacgatggtcaaaaaggtatgtgtaacgtgggggcagaggtcagaaaccctggggccttggaggggtcaggcaatgacgattgaaaaggataagagcaagcacttcttgaaggggtggggcgggtgcttgtcccatctaaagggaggctgccacagcttagtgtcagccagctgttgctgtgagggaatgtgggcccagtgattccagatgggatttttcaagacaatgagaaatgcaaacttttgtaggctctgtcccaaacttttttttttgtgtgtgtgagatggaattttttcttgtcgctcaggctggagtgcaatggcatgatctcggctcactacagcctccacctcctgggttcaagcaattctcctgcctcatcctcccaagtagcacccctggctaatttttttttgtatttttagtagagacggggtttcaccatgttggccaggctggtctcgaactcctgacctcaggtgatccacccgcctcagcctcccaaagtgctgggattacaggcgtgagccaccatgcccggccccataccctttttttttttttttttgagatggagtcttgctgtgtccaggctggagtggcacaatctcagctcactgcaacctccacgtcccaggttcaagagattttcctgcctcagcctcccaagtagctgggactacaggtgtgtgccaccacacccagctaatttttgtatttttagtagagacggggttccaccatgttggccaggatggtatttatctcttgacctcgtggtccacctgcctcagccccacaaagtgctgggattacaggcatgagccaccatgcccgaccagaaaacttttttttttaaagcagcaaaacaccagccctgggttacagtagcaagaccccgtgtctacaaaaaaaatgtaaaaatttgtctggcgtgatggtgagcacctgtaggcccagctactcataggctgagctgggaggattgtttgagcctgggaggtggaggctgcagtgagccatggtcacaccactgcaccccaacctgggccacctagcaagatcctgtctaaaaaaaaaaaaagcaaaacaaaaaattttttgtattttctctactaacaatacaaaaattagctgggcaaggtggtgcgttgcttgtagtcccagctacttgggaggctgaggcaggagaatagcttgaactggggaggcggatgttgcagtgagccgagacggcaacactgcactccagcctggcgacagaacgagactctgtctccaaaaaaaaaagttttctttgcctgtttttttccttttgccaaataacctttaataagaaaaatccttcaatgttgtcttgctgtgtccaggctggagtggcacaatctcagctcactgcaacctccacgtcccaggttcaagagattttcctgcctcagcctcccaagtagctgggactacaggtgtgtgccaccacacccagctaatttttgtatttttagtagagatggggttccaccatgttggccaggatggtatgaatcctcagattcatatttgttaatgtagtttatattaggggctcagcctctatttggattaggtgcaataattacatttatagaaaggagtggagaagggatcagaagacgatggtttctgtagctagtgctggaatctgagatgggaaccatgcgatggggaaagcaagatgaaggggccagaattggtttcattgaactgagaggaaagacatgaccaagcccatatttactctttgctttgtagatttaaatgttgagaaagaaaaacagctggtcagaatgttgagttaaattacgctaacgaggggattctaaagagtgcagaaaccacaaaagagactgcagaaaaccacaaaagtggaactctcagactctccagcaaggcggcgttggagattttctttctcattttgtgtttgtgttggagtagtttggtgctgtaagtgtgatacagaggaattaagccctaattttagtgtctattcacagaaccataattatccagagtgaaccttggtgttttggccaaaacttgggtgcctttctttctttttgaggcccagtcaagatttatctgaatagctccgtgaatttggtggggggagataaattgttaacaaacggaggagtacaaaagctgctttgtgggtgctgtcagtttataaatcacaccctcttacaagtgtgacacttggccttggtgtgaagggttttatggcttaagggccttctctgattgaggcaggtctttcacattcaaatggagagagtgcctagctttgttagccattcacagctggaagtttccctggagtcagttctgatggtgcccactggggtggatctggaaacctcttttgggaaccactttatctcgctatgaggagaatgtgggcagcccaggcctttgcccaccattccggagggccctacaggcacagaggtttttgtgcagcctcttcctacgtggagctgagctggaaggtatcaaaatattccccagctgacattgttagtcagctgttacacttgaacaatgcaggctcggattccaaccccaagcccttaaggttacgaggcattcagtgcattcctgctgacaatccctgggattccaaaccttgcctttgtgcagcctcaccaagggccctgcggaccgactgggctggactgggttttggccatggctttgtcaccttgcaataacatgcctccttccgttttggcacagatggccctgtgatttcaaggttctcttccaacaccaaagattccttgattcagatgctgcccttttgcctaattgtacagaataactagttgggttgtgctcagagagtgcagggtgggggtggggaagcagctacttcctgtttcctgtgaaaggttttctggttagggttcccttcccctccccgctttccctaggtttaaccaaaggttgtaaagccacttttgcttcaaggtacactttgtgctcctaaattagtaacgttgaaaaacaaaaaggaaaaacagcctgtggttttcacaccctctaggaagctggtgggcctttctagcacctgtgccattctgataaataagggcttaggaaaatgcctagcccagaaataggtgctcagtagtttgtttgcttcctttggtgctcaggagaagatttgagacggatttcgtcacaatcaggtctcgggcacaagcctcacatggacactgacatgcaggagccagaggagacagcaatgaggtggtggtaaggaagtgcccaaaaaggtttcccagaggaagagttgtttgtgttggcatgtgagggacaagctttccaggcaccagagccaagagcagtgctctgtccgaggaagtaggataaaccgaaagacggacgtaggggcagagttgctgtggctgccctcactgccgcagccagctccttccatgagttgcagaatgcctactgtgtgcaaggcactgtgttgagtgcagggaatcacatccagtcttgttgtccccatctatagctgataaagaagctatgagaaattaagtgacctgaccaaggccacacagctgtggaagaaggggcgagagcatagacagtgggtaagggcataggctcaccctatgatttacaaagagggatacccctgaagttgctagggtaacgtgacatattaggaggatggtgggataaaatatgtgaacatcgggatcattctggaaaacctttaggataaaaggccactgtcatgctcccatgttcacgtttctttattgtgagttatctgtgttaggtgctgccagagatgatgagatgcctgacagtggttactctgtaatagctctttaaaaattaaagacaaagtagggtttgttcctgactgtactagaaatacagatttaattttacctctgctcctgaaataggtgactaatttggagtactattaatactcttttcatgaattagttgagaaattccacagttgaggagtgattcattcttttgactccctctttctgagcaatttgttgacagccttctcatcctctcttacacccgtcattaaagaaacagtcgagttctttttctttcatgtggtaccttggtttccactgctggtggcccttaggttgcttgtctctgtctccccgcttccattttaagctccatagggggaaggtagtcttgttcactgctagactcctagtccagtgtgtagcacagtcatatccacggaatatttgttcagtgtactggtggctgttaactgcagcataatccagcaaccctggagattattttcttcctttttttttttttttctttgaagcagggtctgactactctgtcacctaggctgaagtgcagtggttcaaacactgctcactgcagcctcccaagtagctggaattacagacatccactacacctggctaatttttaatttttaaaaattattattatttctgagatggagtcttgctgtgtcacccaggctggagtgcagtggcacaatctcagctcactgcagcctctgcctcctgggttcaagcaattctcctgcctcagcttccggagtagctggaactgccagtgtgtgccaccacactcgactggtttttgtatttttagtagagacggtatttctccatattggccaggctggtctcgaactcctggcctcaagtgatccgcccactttggcctcccaaagtactgggattataggcgtgagccacagcttccagcctgattgtttccattttaaaaaagagtaattgaagtaacctttgttaccaatgaaatgaattaaccttctagtatattaattctcacggtttaggttatttgaactaagctgagagaacagaataccaaagaagacaatagacttgcccagaaatatttagaagtaagtcactcagttgcctggattggaaccctcaggccagagaggttcaaaatcctgcatttttttttttttttttttttttttgagacagagtctcactctatcacccaagctggagtgcaatggtgcgatctcggctcactgcaacctccgcctcccgggtttaagcgattctcctgcgttagccttccgagtagctggaactacaggtgcgcgccaccacgcccagctaattttttttttttttttttttttttgagatggactctcgctctgtcgcccaggctggagtgcagtggtgcgatctcagctcactgcaagctccacctcctgggttcatgccgttctcctgcctcagcctcccgagtagctgggactacagatgcccgccgccatgcccgactaatttttttgtatttctagtagagatggggtttcaccgtgttagccaggatggtctcgatctcctgacctcgtgatccgcccacctcggcctcccaaagtgctgggattacaggcgtgagccaccgtgcccagcctaatttttgtatttttagtagaaacggggtttcaccatgttgaccaggatggtctcaatctcctgaccttgtgatccacccgcctcagcctcccaaagtgctgggattacaggcgtgagccaccactcctggccaatcctgctaattattaatatcagaactacttggttcaaaggagtggaaatagggcaacgaggggtgtaaatttgcagttaggtggaatgctgatagcaagttttccaggtaggagagttagttggggtgggggatgctaatgttagcttatctctgtatatatatttaattttatatgttatttatttttgagatgggatgtaactctgtagcccaggctggagtgcagtggcacaaacacagctcactgcagccttgaactcctgggctaaagggatcctcccacccacctcagtctccaaggtagctgggaccacaggcatgtgccaccatgctctgctaattttttcgggtttttttttttttttgagatctcttgctgtgttgcccaggctgatctcaaactcctggcctcaagtgatcctcttgccttggcctctcaaagtgctgagattataggcatgagccaccgtacccagcctatattttttttattgtgacatttaatgcacaaaagaagatatgcagcatcaatgcagataatggaacaaaacaaacactatccgccttaaaaacacaaatatttttggtacttttgtaccaatctgtatgctgtttctctatcttctacttcttctccctgtaccctcaccaggtaagtaaccccagagctgctggtacatttgtgtggattaaaaaagacacctggaaggggcagatacagccctgcttgacttcctgttttatcacgtgtttataaatctaaacaatgacatggaacttattatacaatattttaggcataaattaagaatgatttcgctcaccatcatagacctaccactcaatttgaagcatcaaacattactggtatggtgaggccctctggctgtccctccaacagaagttaccaccctcctcagttgggtttctcattcctatgcatttcttcttactacttatgtatgtatttccaagcaacacatagaattgctttgcatgctttttatcttcttaaaaattggttttatattgtatgcatggtgccacctgcttttaaggagaagcaacacgtttgtgaggccatctgtttatatgttgttctagggctttgctgtccattttggtagccactagccacagctggctgtttaaattaattaaaatcaaatcaaatcaaatatttagttcctcagtctcactggtcacatttcaagtggccagtaagcacatgtggccattggcatctgtattgcatagcacagattacattctgttccatcatcacagctagttctcttggacagccctgcagggcatttctttttggtttttgttttgtttttatttttgttttttgctagagtctttgttgtgtaaatacattactattttatatccatttttctatttataagcatttgggtatgctcataatttgctgttacaaattgtgctgcataagcattttgtttgtgtgtgtatagatgatctccttgggcaattgtgttaatttctcttgggtatatacctgggagtaaaattaagataagggcattttcagctttaccagaccccgttaagttactctcaagtggttttatcaatttatattctagaaccaacattatgtatcagtaacatttggtaacttcaggcgttttttttccattctgctgagtgtgaaaaatgtgttttgattatggttgtcatttgttagaatactttgttaaagctttttaaagattcttggtccctctaccctccccaccccctaccccaggaattttgattgggtaggacctggggattatattcatctttatatgcagaattatattacttgttactgttaggcctgatttaagaagtaaaataaggctgggtgcagtggctcatgcctgtaatcccagcactttgggaagccaaagtgggcacatcacttgagcccaggagtttgagaccagcctgggcaatgtggctaaaaccccttctctaccaaaaatacaaaaattagctgggcgtggtagcacgtgccagtggtctcagctactggggaagctgaggcgggaggattgcctgagcctggcaagtgtaggcagcagtgagctgagattgtgccactgtagtacatcctgggtgacagagcaacacactgtctcaaaaaaaaatttttttttaagtaaaataagttcataattccaaatgtggaaaatgcagaacaagttaatgaaatgttaatcctactaccaaatgataactataaccttcctttcagtatttttctatgtatatacaacaaaattggggcactgtttaatacagataatatatatagttagctctccttattaatgggcttcacattcatggattcaaccaactgtggatcaaaaatctttagtgtgcttggagtacatccaaaaaaaaaaaaagaaaattgaaattatgttaataataaaatatttgggaaaaaacattgcgtctatctgtaccaaacatgtacagactttttttcttgtcattattccctaagcaatacaatataacaactgtttacatagcaattccattaggtattataagtaatctagagatgatttaaagtatatgggaggccaggcgcagtgcctcacgcctgaaatcccagcactttgggaggccaaggcgggtggatcacttgaggtcaggagttggagaccagcctggccaacatggtgaaaccccatctctaacagaaatacaaaattagctgggcatggtggctcacacctgtaatcccagctactcaggaggctgaggcaggagaatcacttgaacttgggaggcagaggttgcagtgagccaagatcgcaccgttgcactccagcctgggcgacagagcaagactctatctcaaaaataaataaataaataaagtatatgggaggatgcacgtagagtatatgcaagtactgtgccatttatttatttagagacagagtcttgctttattgcccaggctggagcgcagtggcgtgatctccgtctcccaggttcaagtgatcctctggcctcagcctcccgagtagctgggattacaggcttgtgctaccacacccggctaagttttgtattttaagtagagggcgttttcaccttgttcgccaggctggtctcgaactcctgacctcaggtgatccgcccacatcggcctcccaaagttttgggattacaggcgtgagccattgcacctggcttgtatatgtgtatatatatgtacatggttttgtcttttgcttttttcactcaataagcattccccaaatctgctttggagcacatgattttattttatttttatttttttatttttttgagacgaagtctcgatctgtcgcccaggctggagtgcagtggcgcaatctcggctcactgcaagctctgcctcctgggttcacgccattctcctgcctcagcctcccgagtagctgggactacagacacccgccaccacacccggctaattttttgtatttttagtagagacgggtttcaccgtgttagctaggatggtctccatctgctgacctcgtgatccgcccgccttggcctcccaaagtgctgggattacaggcatgagccaccacgtctggcctggagcgcgtgattttaaatgtctgtgtcatttttcctcttcttgcctagccataatctattttaccagtcacctattgtattgaggttattgaggttattgcagtttcctactatgctaaatggctcctgacaacaaatttgatggttgatgggctatgtggagaattcacctttttttttttttttttttttttttttgagacagagtctttctctgtcacccaggcgggagtgcagtggcatgatctcagctcactgcaacctctgcctcccaggttcaagcgattctcctgcctcagcctcctgagtagatggaactacaggcacctgccaccacgcccagctaattttatttttgtatttttagtagagagggggtttcaccgtgttagccaggatggtctcgatctcctgacctcgtgatccgcctgcctcagcctcccaaagtgctgggattacaggcgtgagccacagtgcccggctaatttttgtatttttagtagagacggagtttcaccatattggccaggctggtctcgaactccagaccttgtgatccactcaccttggcctcccaaagtgctgggattacaggcatgagccaagtctttttttttttttttttttttttttgagacggagtcttgctctcttgcccaggctggagtacagtggtttgattgtgatctcggctcactgcaacctcagcctcctgggttcaagcgattctcctgtctcagcctcccaagtagctgggattacaggcacatgccaccatgtccggctaatttttatatttttagtggagacggggtttcaccatgttggccaggctggtctcgaactcctgacctcaggtggtctacccaccttggcctcccaaagtgctgggattataggtgtgagccaccgcacccggccttgttattagtcttaactagattgttgattgaagtccttaagcccagaaatgtatgtgaaggatggtggagaagagtggctcaggcattctaggcagaggtattcttgagctgaggaagtggaggagaggaggtatgtaagttacctgttttcaggggttcattccagtggatagtggatgccactccctggcagacactgtgggtgcctcacctgaaagactcctgattccctgaaggcattgtcgggtgtattttttctttataagcgtaatgccagtggagtgggtaagacaggtaccaccttttgcatctgctgctacagattaggcagcttggttaagttttgttttgtttttaattgttatgagttagtttgaaccaaaaggattgttaagtggagtgtaagaagcactgaataactactgttatctgagaggagtagtaaagaccagggccactgggcaatcccagaggcattaggaatttgtggcctttccctttagagcattgtcattatgtgtatctgcatctctgcattccaactttcacattttcagttcccaggagagagaatctgattggcctggttggggtcctgtgcccacttctggctgtcacctgtggctttcttccctcagttgtagaccacactctggatacctgggacccctgaaatctcctgcccagacaaccccaagcttctcaggactttttgtgggctgcttccctgttctgcctgtgcagtgcaggccttgtcacaatgtctgaatgcttaggccagagacgtgggggtttggtgagaaaggatgagctgggtagctacactcaagtgcagagccaccagtattgtgggacagagccaggcatgggaagagaagtgggcacggatgggggccagctttcccgatgtgccttaatctggcacagaactcctaaggagtgtgaaaatttcaaatttgatccaggccttccaggtggttatgaagaaggcgagtttgtcaagacaggataatacaatatacttcatttaatagcttgttagtgtgatttataactaaatatgtagacatcatatatgggtcttcattcatactcttgccccaggccctgaaagtgttagctaacaggcaagacctgcctgggactgagattctaaaacacaacctccacccccaactccgtttcatcatatagtagcctaacatattagttggttcgttgcttatagtcaggcaaacaacaaagactccgaattgagctcttggtaatttttgaaacctgcctggtaatactgtgtttcctcattctgatggcattcccagaccatattgcaaatgacttgatgtgtattttcagacttgttgagaagggcctggtggtctatatagcaggcataaaatgtcaccaggccgacttcatgacttatcttttgaggtcaaacagacccattgaccaaaagatttgagggcagtgaaaacatcttgtatactatctttaacaatggatttaactcctaaaggaaagccacctaaacatgactgtttaatcttcactagcaatttgaacttttttttttttgagacggcgtctcaccttgttgcccaggctggagtgtagtggtgtgaccttggctcgctgcaacctccacctcctgggtccaagtgattctgctccctcagcttcctgagcagctgggattacaggtgcctgccaccacacccagctaatttttttgtatttttagtagagacagggtttcaccgtgttggccaggctggtctccaattcctgacctctagtgatccacccgccttggcctcccaaaatgctaggattacaggtgtgagccaccacacccggcctgcgcccagataatttttgtattttttttttttttgagagtctcgctctgtcccccaggctggggtgtagtggcacgatgggttcacgccattctcctgcctcagcctcccgagtagctgggactgcaggtgcctgccaccacgcctggctaatttttttgtatttttagtagagacggagtttcgccatgttagccaggatggtctcgatctcctgaccttgtgatctgcccgccttggcctcccaaagtgctgggattacaggtgtgagccactgcgcccagccaacaatttgaacttttatctgtcaaatctatatgcatccttagcaagctttgtaaactgcctggtaactgatagatcttggttcacttagcttcccaaattatgctgttatcatcttgtctctctgttctttaaatatctggttgggagggtatggagagagagggaggaagaaagacacctctgtaagtttgaaattatttgcatcccccccaccgcccaccaccaacctttttaaaatatagagacacagagtctataccacgcctggcctaaaataattttttttagagacgggatctaacagtgttcccccagcttggctatcttaaacttcttaagggtagctagttctaagaactgcttttttctggctaggcacagtggctcacgcctataatcccaacactttgggagaccgaggcaggcagatcacctaaggtcaggagtttgagactagcctgggcaatatagtgaaatcctgtctctactaaaaatacaaaaattagctgggcgtggtggcatgcatctgtaatcccagctactgggggcgctgaggcacgagaattgcttgaacccaggacacggaggttgcagcgagctgagatcatgcactgcactccagcctgggtgacagagggggagactgtctggaaaaaaaaaatgtttaaaacaaaaaactgtttttttgtatgtgtgtttatatgcgaaccatttgtgaaagtggtcccagcatgatgccacatgtgtcatttccaaatatttcagtctgtatttttttctctctctctctgttttttctgtcacccaggctggagtgcagtggtacgatctggctcactgcagcctcgacctcctgtgctaaaacagttctcttgcctcagcctcctgtgaagctggtaccacaggtgcatgccactgcacccagctaacttgtagagattggggtctcactttgttgcccaggctgttatttgactcctggactcaggtgatcatgccactttggcctgccagagtgctgagattacaaaagtgagccaccacactcagccataaatgtgttgttgttgttgtttttgagacagagtttcgctcttgttgctgaggctggagtgcaatggcgcgatctcagctcactgcaacctcccccctcctaggttcaagcgattctcctgcctcagcctcccaggtagttgggattacaggtgcctgccaccacgtccaactaatttttgtatttttaatagagacggggtttcactatgttggtcaggctggtcttgaactcctgacctcaggcgatccacccgcctcggcctcccaaagtgctaggatcacaggcgtgagccactgtgcctggacttgtaaatggtatttcaaagtaaaatatatgtcattgcatttatcaagataatttgattgagctttgtaggtcctagccatccttctgcctattactgggctttttgcaaatgctgttcctgtttccacaacctggagcattgtcccatcccttttattgtttctcttgctgttatttattatgtcatccatcatcattataccattcctctgccaagaaacatttaatttttgtttttgtttactattacaaaaatgttttatagaatattgttagacttacattcttgcccctcattgtggaagtattcctgtagtatgaatacagccagaggttttttagttttgttttggtttttttgaggagtcttactccttcatccagaggctggagtgcagtgacgcgatcttggctcgctgcaaactccacctcctgggttcaagcgattctcctgcctcagcctcccaagtatctgggactacaggcggccgccagcatgcctagctaatttttgtatatttgtagagacgggggtttcaccatgttggccaggctggtctcgaactcctgacctcatgtgatccgcctgcctcggtctccaaagtgttgggattacaggtgtgacccaccgcgcctggcccagtgagagttaaagggccagagtggaagcaggtctttggaagcttggctctgtcttccttcagtgcagggagtttgtgttgtccatccccagcctctacagaagcacacagtgagtgttcaataagcatttcttggatcaaatggcccctgcttcttttaatggtcagtaaactttaaataatgagatttttctgcaatagagaagagcaactgccttgtgattggaagccagcatatgttattcctaagcagttctgccttttttccacagaaggtggtcttctgccctgttaaagaagccctggaggtggactggagcagtgagaaagcaaaggctgctctgaagcgcacgacctccgactactttctccttcaaggtgaggtctcaaagcacaacttaccccgggagagcttttggctctgatttctgcaaatgtggttgcaaggtccagatggttttgtgatgtttgccttgggtggcattcttcattggctagttctcagtgatcacttgagaaaggggtggtcacttgaagggggtgaggtctaccattgagctctgggttctaatgacttctcctttttttacttgttgaaatgacctccctgtcaagttgaccttatggtaatagtgttacaggtcacagattgagaaacctctttttttttcttttttctttttttgagacagagtcttgctctgtcacccagactggagtgcagtggggtgcaatcttggctcactgcaacctccacctcctgggttgaagcgattctggtgtcttagtgtccccagaagctgggatgacaggcatgcaccactgcgcccggctaatttttgtattttgagtagagatggggtttcaccatgatgcccaggccctgaagttctgagattataggcatgagccaccatgtgaagcctgatcaaccaacttctcttcaccgccccccgcctttttttttttttttttttttgagacagagtcttgctctgtcacccaggctggaatgcagtagcgctatcatggttcactgtagcctctacttcctgggcttaagtgctccccatgcctcaggctcctgagtagctggtactacaagcacacgccactgtgcccagctagtttttgtatttttttgtagaagcgaagtttctccatgtagccaggctggacttgaactcctgagctctagtgaaatccccgcgttggccttccaaagtgctggagttaaaggcgtaagccaccagtgcttgttcccctcttcagaattctttctctgcctcaaaaccatcctcacgcttatgaaaggtggggttgtttttcctcttgctattaatgaactacttatcagtccatctttgctggtggtcaagagactgttagtaagtattggttggcttttcagtgttcttcctgtacctggcacttttttgtttgtttttgagatggagtctcgctctgtccccaggctggagtgcagtggtgtgatcttggctcactgtaacctctgcctcctgggttcaagcgattcttctgcctcagcctcccgagtagctgggactgcaggcgcgtgccaccacacccagctaatttttatatttttagtagagacagggtttcaccatgttggccaggttgggctcactctcttgacctcgtgatccgcccacctcagccccccaaagtgctgtgattacaggtgtgagccaccgcgcctggcaaacctggcacttttaatttttattttaattttttttttggagacggagtctagctctgtcgcccaggctggagtgcagtggcacgatcttggcacactgcaacctctgcctcccaggctcaagcaattctcctgcctcagcctcccgagtagctgaaatacaggcgggcaccaccatgcccagctaattttctttttttttgagatggagtctcactctgttgcccaggagagcagtggcgtgatcttggctcactgcaacctccacctcccaggttcaagcgattctcctgcctcagcatcctgagtagctgggatcacaggcacctgccaccacgcttggctaattttttgtatttttagtatttttgtattttttttgtattttcaccatcttggccaggctggtctcgaactcctgacctcaggtgatctgcccacctcagtctcccaaagtgttgggattacagacgtgagccactgcacctggctgcgctaatttttgtattttagtagagacagggtttcaccatgttggccaggctggtcttgaactcctgaccccaggtgatctgcccacctcagcctcccaaagtgctgggattacaggcatggtagttttttaaaaagtattttttttaatgttatttatgcatttatttttttgagacggagtctcactctgtcacccaggctggagtgcagtggtgcaatcttggctcactgcaacctccacctcccggttcaaacagtttccccgcctcagcctcccgagtagctgggattacaggtgcccaccagcacacccagctaatttttgtatttttagtagaaacggggtttcaccatgttggccaggctggcctcaaactcccaacctcagatgatccacctgcctcggcctcccgaagtgctgggattacaggcgtgagccaccacgctcagctggatgaactatttgaaagtcccgaatatccatttgtgtagaaataaatgggttgagcaggaatgagtgttgcatgtgagtgggctgcactcagaaaatgcctcctcttgatagtgggatcaggtgtggaagaggcaccagcagtaagagcagagtcttttccatgtgggaacagtgcctgggccctttgggagaagcttgttgctcactgcctcgcacatagaaagccctcaggaaacaatggcgctaatttgccaaggtttgggtttgacttgagcatctctaactgctgcttatgaaaggagtcaactgggctgggctactaaaaatacaaaaattagccggatgaggtggtgtgcgcctgtaatcccagctactcgggaggctgaggcagaagcacttaaacctaggaggcaaaagttgcagaatccgagatcatgccaaagcactccagcctgggtgacagagctgaactccatctccaaaaaaaagggggagaaacagagtcaatcacagatcatctactccagagttgaaaagtgtacacgccaaaaaaaaaaaagagaaaagaaaaaaagcacatatcttcacggatgacagagttctctaggacttgctctgtgccgggcgttttccatgtatatcaccttcatctcacaaaggccctcaggcaagtgctattaacaccaccagctacagaggggaatctgaggctcagggaatttaaagtcagtggctcaagatcacccatctaaaacaaaatggcagtgcccactggaagccaggtctgttttgattccaaaggtcttgttctttttctttttccccagagacagagtcttgctctatcacccaggtaggagtgcagtggggcgatcttggctcactgcaacttctgcctcctgggttcgagcgattctacaggcacgcaccaccacacccagctaatttttgtattcttagtagaggcagggttccaccgtgttggccaggctggtctcgaactcttgacctcgtgaaccgcctgcctcggcctcccaaagtgctgggattagaggcgtgagccaccgcgcccggcccaaagtcttgttcggaacaaccatgcaccactgcctgccacagaagtcatatagctactgtttcttcctcaaccacctgtccacccctccaaccccgtaacttctgatgctgatgtccagtagcacctgcactgaatattcactttgctcctagatatcagttttgtcccctcagttcaatgacccctgtgatgttgagatggatgagaaaatactctggaaactgcagaggataaaatcaggatttcctcacttcagcacactactgacattctgtgctggataacactgtcacgggggactgtcctgtgcactgtgggatatttagtaacacccctatcctctactcactagatgccagtaatatctccccacccagctctaacatcaaaaaatgtttccagacaccactgccacatgtccccagttgagaaccactggattatgctaaactcaaaggccagttgactcctttcttttctttcttttcttttttttttttttttgagacggagtctctctctgtcacccaggctggagtgcagtggtgcaatctcagctcactgcaagctcagcctcctgggttcacgccattctcctgcctcagcctcccgactagctgggactacaggcgcctgccactatgcctggctaattttttgtatttttagtagagacggggtttcaccgcgttagccaggatggtctcgaactcctgacctcgtgatccacccgcctcggcctcccaaagtgctgggattacagacgtgagccacttcgcccagcctgtttacccttaattccatccctcagtgggtattatggcaacagtctcatgagtgcctatgaccctttgctggataatatatcctatcatgtttaccactctctcccagatggcattaattatctgtctttttcagttttgagttccagggctttggatatggtaatcaaaacattaaaactatgtgcagtaaatttcttttcttttttctttttctttttttttttttttggtgtggtgaaaagcacataacataaaatttaccattataacttaagcgtataggtcagtaataatcatacaatgttttattttattttgtttttttctgagatggagtttcgctcttgttgaccaggctggagtgcaatggtgcgatctcggttcaccacaacctccacctcccaggtttaagcaattctcctgcctcagccttctgagtagctgggattacaggcatatgtcaccacgcctggcaaatttttttttttttttttttttttttgtgagacggagtctcgctctgtctcccagcctggagtgcagtggcatgatctcagctcactgcaagctctgcctcccgggttcacgccattctcctgcctcagcctcccgagtagctgggactacaggtgcccgccaccatgcccggctaatttttttgtatttttagtagagacggggtttcaccatgttagccaggatggtctcgatgttctgacctcgtgatccgcctgcctcagcctcccaaagtgctgggattacaggcgtgagccaccgcgcctggccacatttttgtatttttagtagagacggggtttcaccatgttggccaggctggtctcaaactcctgacctcaggtgatcctcctgcctcggtctcccaaagtgctgagattacaggcgtgaggcaccgtgcccggcagtgagaacatttacaatcacatattgtgtagcatcaggaaggatttttaagatcaaagttagcacattagaagtggaaataatttaaaagtggccttgattttttttttttttttttttttttgcctactgtaaagtcaagcctcagtaacattctgatttcaggatgcagggtggctttgggggatatccaagttgagtggtaaactttgtaggcactactcttgtttccatgttcctggcacctaagttgatatattttctcacagtcttgtgacaatctttgaagtatagttgttatcccattttcctataaggagaccaaggttgagcatggttgtgattgccgaaagtcatatccgtggttttatagacagtcagaatttagaccatgaggtttgttttacctgtggacttagttttcaacatatttaagatatatctgtagtctgggcgcggtggcttatgcctgtaatcccagcacattgtgaggctgaggtgggcagatcatttgaagtcaggagttcgagggcagcctggccaagatggtgaaatcccgtctctactaaaaaacacaaaaattagccaggcatggtggcacatgcctgtagtcccagctacttgggaggctgaggtgagagaatctcttgaacctaggaggcaaggttgcagtgagccgagatcgtgccactgcactccagcctgggcaacagaacgagactctgtctcaaaataaaataaataaaatatctctaaactaatatatctcattaaatttcagatctggagttctgtgagttagggaaacaggatcaccaccatagtagaaaaaactctggtgcagatagttttagacacaaagattatctgaattcaggcccagataattgtcttctttttccccaagaaacatttgaattgtatttctgttagataagcatcatagtaaaaagtcttcaaagtttttgaaggcagaaaaagttttctttgttaaacccttcccatttttttgtcttctaaatttctaggagaactactgttaagttttttagtatcttgttgaacaatggttaacaattataatcatttgtgtttatgtaatcaaactgtgaaacaccggttgggaacttgcttgtgtacacttgatggcgtaaatggtaggggaagagcatacatacaaaagtggcctcttttgctttcttggcagcatgatgttatattcctttggatgtaccgtcatctatgaccagtctcatcttgaaaggcatgcttattttccatttttcccagtgcttggaatttgtttccaaaattgtttctaggaacatgactaatgtgactgacgatgccttaggaattcctagtggggacaaggtgcttggctgggatgcatacctaagaatatctcacaaagaaacctgattttgtttcactattgcctaatggcgcacatagtaggtgctcaataaataaatattttttgcatgagtggtttttgcttgtctggtcatttgccctattgtagagggagagtagtgtgcccactggagtccccacagggtccttttgcctgcatgcctacccctgtggcacccatcaggcttttgattccaatgttgccctgggctctcactcacaggtagatgttttttattgccccattcacaattcagccacctgctgtccgcatgcatgtgcttgccatgtttagatattgggtgtttttccagtttacttaataagttagtggccagactgtacgcttcctgctgcatttttccactgtcttgagagttggcctcgccatctgtgagcaaaaggtctcttctttttattattctcccatggcatgttgcaaaacagtaagcgtgagctggtttcctgtggcaaaaaaatgactttgatttgttctttttgaggttactgtgagtttatcataacaggagtgctaaaaataccgagtctggtatggaaacagcattcacttaccagcatgaacaataacatacaggtttagcctagagcaggaagaaatggacttcatctcaagatgagaatacttatcagagaattcttggcaatcttaacttgctcagtctctgttctgatgagttatggaaaagtacttagaccatctttgagccacagaattgaagctgaaaatattcttagaccaaacattttgtgagcacctgctatgtaccagatctcatagctgggactaatcagaggaagaggaatagaataagtgttcttgccaatgtgaaagacaaacaaataattctactccttgtgaggacagctataacagagggctatagaaactatcatgtgttgttcctggtttttgtttgttttttttcccccccaaaacagggtcttgctctgctttccaggctggagtgtggtggcacaatcataactcactatagccttgaactcctgggctcaagttatcctctcacctcgacctgcaaagtagctgggactacaggcgtgtgccaccatgtccagctattttaaaaaatctgtttgtacagattggggcagggaggtcttgctatgttgcccaggctggccttgaactcctggcctcaagaaatcctctcacctcagtttcccaaagagggactataggaaagcaccaccctgcctggctcgttgttctgtttttaaatacatttgcattattccataataatcaaagtaatttattatgggaacttaggaaactgaaggtctgaccatctttggggagttgtgaagtcttgacagaggaggggagatctgagctgtatttctcggaacaggtatttgccaggtgggaaagagggaagaatattgcagagcaacacatgcacagggccagcaggatagaggctgagcctcggaggggactggagcttggagagagcaggctagtggtttccctattgatagaatatcagaatctggccaggcgcggtggctcacgcctgtaatcccagcactttgagagactgaggtgggcagatcatgaggtcaagagatcgagaccatcctggccaacatagtgaaaccccatctctactaaaaatacaaaaattagctgggcatggtggtgtgcgcctgtagtcccagctactcgggagggggaggcaggagaatcgcttgaaaacctggaaggcagaggttgcagtgagctgaggtcgcgccactgcactccagcctgacgacagggcaagactccatctccaaaaaaaaaaaagaaatctatctatctatcagtcagaatcactgaggaaaccgttgaaaaatgcggagtgcctgcttgtagctcacattactgaatccagatagctaggagtgacttgcatgtctgcatttttctatagcacccaggtttctcaaatcagccaagttaggggaaagtactgtcataggaaagggaagcccatttcccaggtcaaagcctttgcttactcgtttatgtttattttatttttgagacagagtctagctttgttgcccaggctggagttgcaggtgcaatctcagctcattgcaacctccgccttttggattcgtgcaattctcctgcctcagcctccaagtagtggggatcacaggcacacgccaccatgcctggctaatttttgtatttttagtggagacagggtttcgccatgttggccaggctggtctcgaactcttgacctcaagtgatccatgcacctcggccttccaggtgctgagtttataggcatgagccatcgtgcatagcctgcgtttttcttttaaaatgtgttaagcactgtatttcaaattacatttgtgcactgaagcagggaggaaaaaggagctaacccaagtagctgttcaatatagtattttgactgcataccctcaaagtaaagaaaaatctcacctggcgcggtggcttatgcctgtaatcccagcactttgggaggctgaggtgggtggctcacagggtcaggagatcgagaccatcctggctgacacggtgaaacctcgtctctactaaaaatacaaaaattagccgggcgtggtggcgggcgtctgtagtctcagctacttgggaggctgaggcaggagaatggtgtgaacccgggaggcagagcttgcagtgagccgagatctcaccactgcactccagcatgggcgacagaacaaggctctgtctccaaaaaaaaaaaaaaaagaaagaaaaatctctagccggtcgcgatggctcacgcctgtaatcctagcactttgggaggctgaagcaggtggattgcctgagctcagaagtttgagaccagcctgggcaacatggtgaaaccctgtctctactaaagtacaaaaaaattagccagacatggtggcacactcctataatcctagctacttgggaggctgaggcaggagaattgcttgaaccctggaggcagaggttgcagtgagccgaggttgctccattgcactccagcctgggtgacagagcatcttaagaaaaaaaaaaaaagaaaaactctaaataaatattgaactctgcttagtagggattttgttttcagatgaggtcttgctctgtaccccaggctggagtgcagtgtcacgatcataacttactgcagcttctccctcccagctcaagcaatcctcacatcacagcctcccaagtagctgggattataggcaagtagcagggattacaggcatgcaataccacacccagctgattttggtattatttgtagagacggggtttcactgtgttgcccagggtagtctctgtctcctgggctgaagtgagcctcctgcccaaagtgttgggattacaggtgtgagccactttgcctggcctagtaggtttgtttttcacagtgataggggttagcaattctgaaactacttactgttcttctaagattgagcagataggtaagtatagtgttaatagtgagaatcaagttttcttattgtcagaaaagggtgttcctatgaatgtggacagtgggaaaggctagaaggagccatgtggtattggattggaattgaagttatctggatgaactcatggtttcttatacgtagatgtagtaatagatgtatgtgtgtatgcatatccacttttacacgtgtttatttcctagaattgtttcctagaattgttgagagggtttatgcccagagacatcccagaagcactgaacgcactcatgccaagatgttaatacctttcctcactaaagagaaaccagggttccttggagaaatggctgtttccagatctggggtaggaaaattacaggtgagcttggaatatcctgctatgccagaaagtaaggaagtgctctaagaatgataggggcatgtcaaaagaacaagaagaataatcaattaatgtaaacaaggaattatgaagataacaaagtctatctttgactatcaccatagtagtaacaattgtttcaatcaagaatcaaagtgctaaaatcaatggggaacagtttgcggtgaaacagtgtagatgtttccttatcagatgcttttatgctatgcctggtggctcacccctataaatcccaagaggctgaggcaaattgatcacttgcacccaggagttttgagaccagcctgggcaacaaaacgagaccccatctctacaaaaaataaaaaagttagccagatacagtggtgcatgcatgtagtcctagctactcaggaggatgagatgggaggatcggttgagcgcaggaggtcgaagctgcagtgagttgtgattgcaccactgcactccagcctgggagcaagactttgtctcccccgaaaaagaagatgcttttaaatgaattacatagagagacattggagaaccctggcaggttgtacctcagctgagtgatgaaattaacaatctagggatggacagttagacctcatgcctcttggaatatgtaaccctgggttggatctgagaatagaggaaggttttttttcttttgctctaaaggatgttagtggaacaattggtaaaaagaggccccggcgtggtggctcacgcctataatcccagcactttgggaagccgaggcaggtggatcacctgaggtcgggagttcgagaccagcctgcccaacatggagaaaccccatctctactaaaaatacaaaattagccaggcgtggtggtgcatgcctgtaatcccagctacttgggaagctgaggcaggagaatcgcttgaacccaggaggcggaggttgtggtgagccgagatcgcgccattgcactccagcttgggcaacaagagcgaaactctatctcaaaatagtaataataataataaaataaaaaacaaataaaaaggtctgtaggttagatagcagtactgtttccatgttatttatttttacagttatgataattgtctcatggttatttaagagaatggtttttgttttgtttttcttgttttttcttttccttttttttttttttttttttgagatggagtctcactctgtcgcccatgctggagtgcagtggcatcatctcggctcactgcaagctccacctcataggtttacgccattctcctgcctccccctcccaggtagctgggactacaggtgcccgccaccacacctggctaatttttgtatttttggtagagatggggtttcgccatgttagccaggctggtctcgaactcctagcctcaggtgatcctcccacctcagcctcctgaagtgctgggattataagtgtgagccagtgcacctggcctctttttttttttttttttttttaattttacagaattttttttttttttaagacagagtcttgctctaaggctgtagtgcagtggtatgatcacagcttgctgcagcctcagcctcctggactcaagcgatcctcccacatcacccttctgagtaggtgggattattgtaggctaaatttttaattttattgtagagaggcctcactccatggcctaggctggtcttgaactcctgggctcaagtgatcctcccacttctgcctcccaaagcattgggataacagacgtgagccactgcacccagcctgttagataatttagaaaattttctttcctcattcttcaatttcccctcattcacactcccaactttcctgttttgtgatttttaaatgacgttgtctttggatgccggctggatttggtgattagttctcttcagaagaaacttcttattttagaacttgtaacctttgcaaagcaggccataggcagccatcgctatttgggtatgacattccccagtgggtttttggtgtccagtaatgacaaaaactgctgagaaagagacagccacagggaaatgggttccgataatggggcagcagctgagtgcttgttgatttgctgctgtcatgaccacagatgtttaaaaataatttgtaaggaaaaagaaaaaagcgtagtgtgtgtgtgtgtgtgtgtgtgtgtgtgtgtgcgcgcacgcacgcgcgcgcgcacaccactgccttatcagtggtagagaatgcagaccacagtcattcagaaaggaagaaggcaccaccatggaaacaggagaggtgaggagaagggcagaggtgacccacaaatgcggctcagtgccttacagcagagagctcatgagagaacagaactggttagtcaccgactctgctcctcggtctgcaagagaggttcagcaccaagtctatactacacagtactggaaggattagatgaaggcctggcacacattgtgaattaatagttactggttacaggcggggtgtggtggctcaggcttgtaatcccagccctttgggaggccaaagtgggaggattgcttgaggccaatagtccaagaccaacatgggcaacatagcaacaccctgtctctttttttgactgtttttttgaaacagtctcgttctgtcagccaggctggagtgcagtggcacaatcttggctcactgcaacctctgcctcccaggttcaagcaattctcctgcctctgcctcccgagtagctgggattacaggtgcctaccaccacgtccggctaatttttgtatttttagtggagatgggctttcaccatgttggccaggctggtctcaaactcttgacctcaggtgatccacccaccttggcctcccaaagtgctgggattacaggcgtgagccactgtgcctgaccggttcacgtactttacatgcattgtgatcatattaaatcttcatgacagccttactagatcaggtcttgtcctgttttcacatgaggaaattgaatcttggaagggctaagtcatttgtccagggtcatcacacgcagtaagtgttagagtctaaacgagccagagctgtcacactgtcatccccagggccttgtgtttaagcatcgcccaacaaagtgctcagtcagactttaattattagcattactaataataccattatgatgattattttgtctaaacttcacaggcacctcgtgacattttcttattccacttttgcagatgggaaactgaggcccaccaagatcagattacaataatgggcaacattgtcagcaacctgccttgctttttttcttagcaggcccacatctcccccactcccccacccacttggcagtagcctgtgtttgagctgctcacaggccccaaggcccagctgcaattcttgtttaaagcctcacatcttttctctgactgtcagacaacagtcacgggaatgtcctgtgccatcttccctcggcaagaggggttggcagagagcagcagatgcctagagtcaaggtcatgtgctgctcaagtgctgggctggagacaagaccctctctccctgctgcttgtgaccaggcagggtggctctgaatgtagagggctctgtcagaacagttctgtgaccagagggtgtggttggcaaagcaatgcattaggggcccatggaagtttattcttgttgtccacattatttccctgtgacttttagatttttttttcctttttgtaaattagttttttcatactagttagaatgtttcaccttaaaggtgagagtcaagctctggaatcgcctgacatttttaaggaaaggaatagaatattgggctggggctagtctgaaatggtggtttgtattattttaaattgatgggctctgggttaggggagccaaatccattttaaagtgatttttgtaaaaattggcatgtcttctgtttcttctcttttccaaaggtgacactataacgtagaggttaagaatgtggtgacttttaaatccgtcgtgaccataagcctctcctaagccccagttttcctaccactaaaatgggggtggtaacagttgtacctacctcattctgtcttttttgttttttgcttgtttgtttgttttttagatggagtcttgctcttgtcgcccaggctggagtgcaatggtgtgattttggctcattgcaacctccacctcctgggttcaagcgattctcctgcctcaacttcccgagtagctgggatgacaggcacccgccaccatgcccatttagtttttgtatttttagtagagatggggtttcaccacgttggccaggctactcttgaactcctgacctcaggtgatccacccacctcagcctcccaaagtgctgggattacaggcgtgagccaccactgccggcctcgttctgtcgtatttttttacgtaggagagctcagtctgaatgtaggatatgacatggttgtggggttttttttgtttttgttttgtttttgttttgttttgttttgttttgttttgttttgttttgtttttgagacagtctcactctgtcccccaggctggagtgcagtggtgtgatagctcactgaaacctctacctcccaagttcaagcgattctcctgcctcagcccccaagtagctggaattacaggtgcccaccaccatgcccagctaatttttgtagttttagtagagatgaggtttcaccatgttggccaggctgctctcgaactcctgacctcgggtgatccacccgcctcggccttccaagtactgggattataggcgtacttggaaggtaccatgcccggccattatatgctttttaaaaaaacctaaatgttgcaaaaaacatgtgtctaaaatctctgtttcaacatagttttttaatagccatgtaatattccattctgtcaatatgtctttatatgtggtacagactgagtgtctaaatccaagaacccaaaatctgaatttttttttatttttcatttttatttgtttacttatttttgagacagagtcttgctctgtcacccaggttggagtgcggtggtgtgtcggctcactgcgacctccacctcccaggttcaagtgattttcctgcctcagcttcccaagtagctgggattacaggtgcccgccaccatgcctggctaattttttgtatttttagtggacacgaggtttcaccgtgttggccaggctgatcctgaactcctgacctcaagtaatcctcccacctctgtctaccaaagtgctgggattacaggctgagctactgcgcccagcctatttttgtttttttgagacagagtctcactgtgtctcccaggctagagtacagtagccccatctctgctcactgcaacctccgcctcctgggttcaagtgattctcctgccttagtctcctgagtacctgggattacagacgtgtgccaccacacccggctaatttttgtatttttagtagagacagggtttcactatgttggccagcctgatcttgaactactgacctcaagtgatccacccatctcagcctcccaaagtgctgggattacaggcatgagccaccgcaccaagcccccaaaatctgaaatgttttgagtgccgacataacactcaaaaaaatgcttattggccccgggcgtggtggctcatgcctgtaatcccagcactttgggaggcctaggtgggtggatcacctgaggtcaggagttcaagaccagcctggctaacatggtgaaaccccgtctctactaaaaatacaaaaattgaccaggtgtagtggtgggtgcctgtagtcccagctactagggaggctgaagcaggagaatcacttgaacccaggaggcacagcttgcggtgagccgagatcccgccactgcattccagcctgggcaacagagagagactctgtctcaaaaataaaaataaaaaaaaaataataaaagctcattggagcattttggatttgggattcttagatttggggtgctctattggtaagtacaatgcaaatatttcaaaatctgaaaatacccaaaattcaaacacttctgctccctgacatcctgtgtaaacaacactgcagtgaacatttataggtaattcattcagcgggtaagggtcaggaccttttatagggatccttaataccacatttttacatggttcattgagcattcgtgctcccctctgctgtgggtgagggtgcaggtccctcagccttcttgcttgggttgagtcatcctggtctttaatttggtaagcaaaaaatggcatcttgtttttgagctcgtttctgagaaagtgcatgctccttttccccatcaacaactttcatccggcgcctcggaacctcttcagtagagagtgagatgcaaatagcgaggcacagcttctttccctcttctgagctgatgcctggtgaggtcatagactgggtttcattgcaaagacgaaagcgtgggcaggacttttggagcacaaaaaggggcatttcagagtagtcttcatgggcggccactccagaggtgaagttttctagagaaagacatgaaagtactgtgtggctgtggcgacagacagaggcttacgagcctgccctctagagactgtgagctccgcgtgtgagggcaaggcctggggctgtctgggtcgcttctgggtccccaccacagctagcatagggtaggggtggagggggggtgctcaggaagtgatttttgaagagtggatgactgaatacatgcacacacatacttttaagtttctgggttaaagaggaaaacagaatgaggtaaacaaaggaaagtaatgtggaggtgaactgagcagatggcaagatgccgtgaatggttagaggccaggagagccagaatcagagtggcttccgtgaagtgtccctacctcctcccccagcccagctatgtcactcctctgagcttcacacctatggactgttctgcaccctagccctcagatgcaacggtgaaagtgggactcctattgggtttccctgttgaggacagacatggtgccctgtgtatctgctgctgcttttttctttttttcttgctgagtattccatgtgtagcatgtttgtaacacttgataagaaacagaaccatcccagatagcttgaacacttttcaattcagtcagtaacagaccaggtctgctttggatttccaggagcttgtgtcactttattttttttctgagccagggtctcgctttgtcacccagctggagtgcagtggtgcaatgtcagctcaccacagcctctgcctcctgggttcaagcaattctcgtacctcagcctcccaagtagctgggactacaggtgcctgccacaacacccggctcatttttgtgtttttagcagagacggggtttcaccatgttggccaggctggtctcaaactcctgacctcagttgatctgcttgccttggcctctcaaagtgctgggattacaggcgtgagccactgcacccggcctctggattgcccggcctgtgtcactttgtcatgagcccttctcccctagttatcctttattcttcaaacaggcttcctgtgtgacatattttttgagtgcctgctatggggcaagccctgtgccaggtgttcagtatagagtagtgacatcgcctttgccccacagagcataaaaatctaatggaggagacaagccagtccttgtgctagttcatttccacaggtgaatataaaaccacaaactgggcagggcatggtggctcacgcctgtaatcccagcactttcagaggacaaggcaggtggacaacttgagctcaggagtttgagaccagcctgggcaacatggtgagacctcgtctctacaaaaaataaaaaatgaaccaccaggcatggtggtgcatgcctgtagtcccagctatttgggaggctgaggcaggaggatcacttgagttcaggaggtccaggcagcaatgagctgagattgtgctgctcattccagcctgggtgacagactgaggccatgtctcaaaaaaaaaaaagaaaaaaataatcacaaactgtgagtaaggtatctaagggaaaaaactgtgctgggagtgaatgtcaggagacagggagatctgaggcagtatcgtgtccagagcccacagctgaattaatggtaatgcaggtaaatgagctactgtgtgacacaggttaccacagcaagtgtatcggcttttctagggcgagtgtgagctgggtttctggactttgcttaagagcagtgacagacctggaagatactgccccaggcactcttgggtgctttacatgtattggttcatttaatctttaaaccccacaagtgcccttgggattcccattttgcagaggaggctcagggtccttgtcacttgcccaaggtcacagtaagtggaagaatagggagtctagagctgtgctcttcgctgctgccctccagttggaaagctgtccaggccagggacaggctttgcagagagaaggtacagaggacgggacaggcaaatattcagagactatgaggactgaggtggttctgccaactgtggagggcctggtcacttgacaaggcacctcattgcacccccctgaggctctctcaaagccccttttcgagttaggacattgttatctcctgtgtagtttttgttgattgccctctgaaatgctgtgagagggtagaccatccattctgccctcgcctgcccagcccagcacctggcacagtcattgctcagtgtatatttattgaatgaacaattgactgaatgtcaggcccagggctttgccttaggaaacaggctgttggataagaggtagtactaccatactttgcaatttttctggaaatttatgtcacctgggagtggagcagattaccaggctgtttccagagatagcgactctccataaagtgagccaacctgggggctgggcgcagtggctcacgcctgtaaccccagcgctttgggaggctgaggcaggcggatcacgaggtcaggaatttgagaccagcctgaccaacatggtgaaaccccatctctactaaaaaatatgtatataaatgagccgggcgtagtggtgcgtgcctgtaatcccagctactcaggaggctgaggcagtagaatcgcttgcacctgggaggcggaggttgcagtgagcaaagatcgcgccactgcactccagcctgggtgacagagcgagactctgtcttaaaacgaacaaacaaaaaaaacaaaagtgagccaaccctggggaggagtctacgttcagctgcagggagccagggaattggggccgaggtgtctggcacagaaaagctttgggcctgtctcaggtaaatgaagttttgatatagattcaactcccctgccccccacaattgaactgtttttgggggccagcaattaggggctaatttgtgacagtgactttattttcttcctactaaagtactggtttattcggtggccttggtgattagatttaggcataatagttaaatgtaatagaagtttatgtaacaaacagtgattaataatgttgctgtccagattcccgttatagcgctaacctgatgttatgaactgagattaaatttgaatttgagtgcttacattattttgtaaaggtggttgtatattcacatatccacagttttttctataaataacgtgaaaccgtgcttggtttctcttttccaaagtttgccttttccattacatgggcaagtcctgaacctaagccgagacactagtccatcatctccagcaatgaatgtcatccccccagacttcagcatcctgagttaattaaaaggtgcagatgaagttaatcaagtttggaactctaattttgtgcagtgttttgatacgatttgatgagtcatcttttggtagagcacctctctatccctgacagtgtttgatcttaacggaacagttttataatgtgtaaactggtgggaggtgctcttcagaaatgcagtcaacagtggtatgtgtgcgtgtttggctcttggggcggggcggaaagcagaacaaaggagaatttaataagcgagaacttgtcaggggctagggtcagttctgaggctgctgcctgtcaagaacatggctttcttcctgcccccctccactgctgctaactggagtctgaccttcgagaaagagtgaaaaaagacagcttctgtttgttttgctgcaagtaagtggctggactgattggcccccttcccagaggccctgcaaggacttcagatgtggtcagcgaggtatgtggatggtgccagcctgccggccctcgtccagccaaactgcaccaggaacaggcaagggtcccagagaaacagcggggtcagctgctgccgcctttgctcctgctcttaatgctgtcctatttcttcctaagaggaagctggtttactctctcaagattgatgggcaaagttttatatgaccacggtctccacttctcacccactgaacttacagcttgaaattaacagaggcgaggcccatctggaaaaatgcatttgacaaaaacttgatcaaatgggggatcccctgaggtgggtggcaaagaaccagaccacttggaatcctaggtgctgtgtccctgtatggacctgctgtttcttttggattccattagggttaagaagcacaaattctgaagctagatttgagtttacatttctgctccagtacttgggagttacagtgaccaagtcatttaatgtttctgaacttcagtttcctgatctgtaaagtaggatgggtaggttgggcgtagtgggtcatgcctataatcccagcactttgggaggctgaggcaggaggatcacttaaggtcagaagttcgagaccagcctggccaacatagtgaagccccgtcactagtaaaaatacaaaagttatttgggcgtggttgtgggcgtctccagcctgggtgacagagtgagactccatctcaaaaaaaaagaagaaaaacaaaaacaagtaaataaatgaataaaaataaaggaatccagccatctgttagtatagccaaagcagaggatattgcatcaaatgttaaacgctagtcctgtcagtcactcctgagagaacagggcaacaagacccagaaagggtatcaacactgcctgagcagatggaggcaaagctgtgcatgggctgcttatagggcacagtctgaggccttgcagcagtcacgtggaaactgaggctgcctgctttccaggtgcaaggtgatggacagtggcaggaaccctgtgctagatgactcttgtgcgatcttatttctttgttactgggacacaagcaccaactgtcacaagggaccaacaagaggaggtgattttttttttcagctgttaccacaaagcttttcatcttttggtttgaaaacatagctgtgggaataggccgggcgcggtggctcacacctgtaatcccagcactttgggaggccaaggcgggccgatcacaaggtcaggagatcgagaccatcctggctaacacggtgaaaccccgtctatactaaaaatacaaaaattagccgggcgtggtgatggccgcctgtagtcccagctactcgggaggctgaggcaggagaatggcgtgaacccgggaggcggagcttgcagtgagccgagatcgcgccaccgcactccagcctgggcaacagagcgagactctgtctcaaaaaaaaaaaaagaaaaaagagagagaaagaaaatatagctttgggagcaccaaagcccaaagcgttatagtgcctactatgtgtcaggcactatactaaacatttcacatggcttagcactcatgtgatcttcacgataacctggtgagcgggtaattattatcacccttcctactggtttgttgttgttgttgttgtcgtcgttgttgttttgagacagagtctcgctctgtcacccaggctagattgcagtggcacgataccggctcactgcaacctctgcctcctgggtttgagcgactcctgcctcaggctcccgagtagctgggattaaaagcgtccgccaccatgcccagctaatttttgtatttttaatagagatggggttttatcatcttggccaggctggtcttgaacccctgacctcgtgatccacccgccttggcctcccaaagtgctgggattacaggcatcagccaccatgcccggctacttaatttattttttgagacagcctctctctgtagcccagactggagtgcagcggtgtgatttcggctcaccgcaacctctgaatcctgggttcaagcaattctactgcctcagcctcccaagtacttgattataggcacccaccacactttcggctaattttcctatttttagtagagatggggtttcaccatgttggccaggctggtctcaaactcctgacctcaagtgatctgcccaccttagcctcccaaagtgctggggttacaggtgtgagccactgcacctggcctcctttattttatgggacattttttgaaaagaggcttggtccaaacaggcagtacttgccacttctgcagtcatttctctaccctgccccaaaatggttactcagttgcatttatttactacaatcggaataccagcaggacatctacaaaagtagaagtattgggtggtagcagatcagtgctctctggcatccagatcgtctagatggtcacagcctttttttttttttttttggagacagagtcttgctctgtcgcccaggctggagtgcagtggcacaatctcggctcactgcaacctccacctcccgggttcaagagattctcctgcctcagcctcccgagtagctgagattacaggcacccaccaccatgcacggctaatttttttggtatttttagtagagatggggtttcgctgtgttggccaggctggtcttgaactcctgacctcaggtgatccacctgcctcagcctctgaaagtgctgggattacaggcatgagccaccacacctggccaattgttacagctttgagttgactgccaagtgttgaggtagcattgagggttgcagaagctgtgttcttgaaaaagagaagagagtaacattctcagaaagcaaacagtattcagaagagtcaatgggtgttctggagcttttttcttttctttcctttttttttttaaagaaattaccagctgggtgctgtggctcacgcctgtaattccagcactttggggggccaaggtgggaggatcacctgaggtcaggaacttgagaccaggaatttttctatttttagtgaaaccccatctctactaaaaatacaaaaaattagctgggtgtggctgcaggcacctgtaatccccagttacttggcaggttgaggcaggagaatggcttgaacccgggaggtggaggttgcattgagccgagatcacgccattgcactccagcctgggcaacagagcaagattgtctcaaaaaaaaaaaaaaagaaagaaaagaaaaagaaaaagaaattacctcttctctgatatgcagagccccgtctatactggacaggtggaagttaccagagaaatacaggccaggggcctttgtctgacattggcactgagaaaagcatagcccagaagcagggtgtgtcttttttttttacctgggcatctgtggtttgagatcttcttggaacactttataacccatttctgaacgtctcccaggcttcagtggagccacctgttgtagcttctaaaactgtgtcctcctcagttgttctcccacccattgccttcacagatgcagagaccaagattcactcactcgccattggacctttagcacccaggtctgtctggcacaaagtaagtgccaggctggtggagtgaatgaattctacttagagaatggccctcaacacaggctgctcattaccaaaactatttggtctttaaaaagtgtgactctgatgcttcagtctggggtgggtaccaaatacttgtattttttaaagagcctcacagcaacttgaatttaccttaatttttatgtaggaacccttgtcctggtagagagtataatttgctgaataagtctactttttcaatcaacatatacggaagagatatcaatgaaagaactgacaaactgtaaagccccctctccaggtgtaaagcactcagggcttgggcctagaagctgatccatgtctctgtgtctgttctgaaatagcctgtgtgatgtgggagaaagagtattgtccttagagacaaggctcgagactggctgtgccctttccttgggcagtatgtagggaacaagaatgcctgcccgcccgcaggcaggttacctgtggacaaggtgtagtgggcagttagaaggtgttggtatgttaatcagtcttttttttttttttttttttgagatggagttacgctctatcgcacaggcaaagtgcagtggcgcgatctcagctcactgcaacctcccaggttcaagtgattcttctgcttcagcctcccaagtacctgggactacaggcgtgcgccaccacgcctggctaatttatgtatttttttagtagagacggggtttcaccatgttggccaggctggtctctaacttctgacctcgtgatctgcctgcctcggcctcccaaagtgctgggattacagacgttacagacgtgagccaccacacctggccagtctttttttttttttttctgagatgaagtctcactctgttgcccaggctggagttcagtggcacgatctcggctcactgcaacctctgcctcccgggttcaagcgattctcctgcctcagcctcctgactaagtgggactacaggtgcctgccaccacgcctggctaatttttgtatttttagtagagaccgggtttcaccatgttggccaggttggtctcgaactcctgacctcagatgatccacccgccttggcctcccaaaatgcttggattacaggcgtgagccactgcacccagcctaattagtcttttgctcctatttgtctttatttgggataaaagttatagccttgttggggtcttcttacacagtagttctgactcacagccatcatctgaacctttcctctggttcacaaccaaaattaaacatccatttatggggattgagatagttttcatagtaaaggaagttttgtttgtaatgaccttcctgtttgatgggtctaagtatatggctggcccttctggctaaagcaggctttaaactggtcctgcctagaatgtgtacctcccactccttatcatctctcttctaggtcccttcccctttccctttcccttccccttccccttcgcttcttccttccctttgttccttttcctttcctttttttcttctttttttttttttttttttgacagggtctcactctgtcacccaggctggagtgcagtgatgagatctctgctcatgtagccttgaccttctgggctcaagtgatcttctgccttggcctccttagtagctgggactacaggcaccaccatacttggctaaattttttttttttttttggtagcagtgaggtctcactatgttgcccaggattatctcaaactcctgggctcaagcgatcctcacgccttggccccccaaagtgttgggattgcagatgtgtgccatcacactctgcctcttccgggtctttttttttttttttttcccagacggagtctcgctctgttgcccaggctggagtgcagtggcacgatcttggctcactgcaacctctgcctcctgggttcaagcgattctcctgcctcagccttccgagtagctgggattataggtgcctggctaattttttttatatttttagtagagacggggtttcaccatgttggtcaggctggtctcaaactcctgacctcgtgatcctcccacctcggcctcccaaagtgctgggattacaggcgtgagccaccgcgcctggcttttttttttttttttttttttttttttttttttaattttacttttttgagacggagtctcactctgtcacccaggctagattgcagtggcacaatcttggttcactgcaacttccgcctgctggattcaagtgattctcctgcttcagtctcccaagtagctgggactacaggcacgtgtcaccacacctggctaatttttgtatttttagtagagacagggtttcactatgttggccaggctggtctcgaactcctgaccttgtgatccacctgcctcggcctcccaaagtgctggggttacagctgtgagccaccgcacccggctcttccaggtcttaatagagcctttttcctctactgaaagcttccactgctttctgcccccttcaaactcatatatacttcattgaattgtttcctcggggaagccttcctgataccaccctacagagggtgtcagacgccctattatgctgtcacagcacttttcacagtaaggtaaattgcttttataattattggattgcctctctgactatgtttgttgaataaataaaaaaaggtggccaggtgccgtggctcacacctgtaatcccagcactttgggaggccgaggcgggcggatcacgaggtcaggagtttgagacaagcctgaccaacatggtgaaaacccgtctctactaaatatacaaaaattagccaggcatggtggttcgtgcctgtagtcctagctactcaggaggctgaggcagaagaatcacttgaacccgggaggcagaggttgcagtgagccaagattgtgccattgcactccagcctgggcgacagtgtgagcctccatctccaaaaaaaaaaaaaagtggctttataacctgccttctttttcttattcccagtgctcttaaagttccgtacagataaaggaagagatcccagttctgatacatatgaggaagattctgagttgttgctccagatacgaaatgatgtgcttgactcactgggtattagtcctgacctgcttcctgaggactttgtcaggttggtgtcagtatttatcactgtttagtctggacagataaagtttgttttcaggatttgccttaatttgacaagctcttttattagaaacccttcagagagcaccctgccacattctgctcgctcctgtagacttctgcctctccactagaatagcaatatataaaaaataaagaggggacagattctgatttttacaataagtatcttatattcacgtggttcaaaattcaaggcaatgtaagatctgtaaacattattctctaccttttttcactttatgtgatcttgttatctcttggggacatctccagatcagtacatagtttgctccctcttttccacagctccttagtattctagagtgtgaagcgatggagtttattgaaccagttgcctgctcactcaagttgtgttcaggcttttctaactgcgtaacactgcagtgtgtgaccttgtgtcgtacgtgtgcaggtacaactgcaggataattaggaggaagggagttgctgggtcagaaggttgtaatttatcatttggtcagcattgccaccttgcctccattggtatcctatcaattcatacccccagcagcaaaaccacccatgttcccagcatcctctcacttggacactccatgctttcaccttacgtgactacctttttgctctcataaacaggcttaggatttgattggagaagaccacatagtgactaggtcacaatctctctctctcttttttttttttgagacagagttttgctcttgttgcccaggctggagtgcaatggcacaatctcaactcaccgcaacttctgccgcctgggtccaagcgattctcctaactcagccttttgagtagctgggattacaggtgcctgccaccacgcccagctaattttttttgtatttttagtagagatggggttttccatgttggccaggcaggtcttgaactcttgacctcaggtgatccgcctaccttggcctcccaaagtgctgagattacaggcatgagccaccacgcgctccatccacatctccttccaagcagctctgggatcatgtacacaccctaattccctttccatgtcttgagaggcttcctaaactcggctttgcagtgcctccagcttgtagcagtgataatgatggctgcagtttactgagcagctgttatgtactaggcatcaggtagtaagtagccaacccagatcccaccccaggtatcattacagtgcttgctctagtagcagcatgctaccttggtttcttatcaacagtaaggtctgccagagtccctagtcctttctttgttgacttcctgctgggaacttcaggtgagcaacagcaaaccccactccatttagggccagcagtggtctttgaagcacctgtggtgccctgacccaaaaagccatgattgtcctggtacagtggctcacacctataatcccagcactttgggaggttgaggcaggcagattgctttgagcttaggagtttgaggccaaccttgacaacatggtgaaaccctgtctctacaaaaaatagaaaaattaactgggcatcgatgactggtgcttgtagtctcagctactctggaggctgaggctagagcatcgcttgagcccaggaaagcagaggttgcagtgaaccaagattgcaccactgcattccagcctgggtgacagagagagaccgtgtctcaatacatatagcgtaaggctgggcgcggtggctcacgcctgtaatcccagcactttgggaggccgagacaggcagatcatgaggtcaggagattgagaccatcgtggctaacatggtgaaaccccatctctactaaaaatacaaaaaattagccaggtgtggtggtgggtgcctaagtcccagctactcgggaggctgaggcaggagaatggcgtgaacccgggaggcagaggttgcagtgagctgagatcacgccactgcactccagcctgggcgacagagcgagagggagactccttctcaaaaaaaaaaaaaaaaaaaaaaaggcagcaatagagtggcagtgcctgagcacacgagactgagacatggaaaagcggtttccccaaagagggtgggcagggaaggaaccactttggagagaaaaccagccagcagctcgttaggctgtggctttcctcttctaggaagcagggccttcaactctgctggccggtgatgcagagccagaccgttcatcactttgaatgcccaagtagtcacttggctgcacactcacggcccagcacacagccccaggtatgctcagtggctgccgcttgccactggctgactggctgggattattggaactgaagccctgcatgacccagtccttcttcctgctgcgaagcacagcagaggaaacacttgcttctcacaaactggtcattcctccaccaagagatgagtgccccagtgagttaccatgagatccaagcctgtacagtgtcatcagccgctgacctcacggtgctgatgttacaaaggcaccttgtaaactgctgcctatgtttagatgatggctttttttttttttggagacagagtctcgctctgtcccccaggctggagtgcgatggcatgatcttggctcactgcaagttccgcctcccgggttcacgccattctcctgcctcagcctccccagtagctgggataacaggcgcccgccaccacgcccagctaattttttttgtattttttagtagagatgtggtttcgctgtgttagccaggatggtcttgatctcctgacctcatgatccacctgcctcggcctcccaaagtgttgggattacaagtgtgagccaccacgcccagcctctttttttttttttttttaagatagggtctctctctgttgcctaggctagagtgcagtggcacatcatagctcactgcagcatcaacctcctgggctcaggcaacactctcatctcggcctcttgcgtagctgggactataggcgtgtactaccaagcctgcctaattttttttttttttttttttttttgtattgacagggtctcactatgttcaccaggctgtttcctattttttaaagttatgaaccgcataacaagagagtatacaaagcacatctgcctgagttaaatgataattaatacttatttatttttgttgtagagacgggggtctcactctgctgcccaggctgttctcagactcctggattcaagccatccttctgccttggctttccaaaacttctgggatagacaggcgtcagccacttgtatctcttttaatttggaatagcccttggcaaactggcttgccacctctttttgtaaataaagttttattggcacacttactcatttatatattatctgtggcagcttttgtgccacagcagggttaaatagttataacaaagaccatatggcccataaagctgaaaatattttattatctggttcttttgtttgtttgtttgtttttgagacaaagtttcactttgtcacctaggctagagtgcagtggcatgatctcggctcactgcaacctccacctcccgggttcaagtgaatctcctgcctcagcctcctgagtagctgggattacgggcatacgccaccatgcccagctatttttttttatttttttattttttttatttttttttgagatggagtcttactctgtcacccaagctagagtgcaatggcccgatcttggctcactgcaacctccgcctctgtgctctgtggttcaagtgattcttctgtctcaacctcctgagtagctgggactacaggcgcgtgccaccacgcccggctaatttttgtatttttagtagagatggggtttcaccatattggccagactgatctcaaactcctgacctcatgatccacccagcttggcctccgaaagtgctgggattacaggcatgagccactgcacctggcctgttatctggttcctttttttttttttttttttttttttttttgaatcagagtcttgctgtgtcacccaggctggagtgcagtggcgtgatctcggcttattgcaacctctgcctcccagctttaagtgattcttttgcctcagcctctggagtagctgggactataggcacgtgccaccacgcccagctaatttctgtatttttagtagagacggggtttcaccatattggccagactgaactattcctccaatacggccaaaatgagattctaccagcaatgggaggagtttttttaattattattattgggagtctctctctcacccaggctggagtgcagtggcaccatctcggctcactgcaacctccacctcctgggttcatgcaattcttccacctcagcctcccgagtatctggcattacagctgcccgccaccacacccggctaacttttgtattttagtagagacggggtttcactatgtaggtcaagctggtcttgaactcctgacctcaaatgatccacccgccttggcctcccaaagtgctgggattacagatgtgagccaccgcacccagccctagttctccatgtattttagagctctgtagtggaccttgataagcaggaagatgttacccctggatgaacaaaatgggaatgtgctggtcctggccagggcgtaaggagccggaggtgcctttggacacagctcttgggattggaatggatacagccttttgggagggcattttggcaatacatatgaaaaactagcattgctatatttagaaatttgtcttaaggaattatttcgacgcctgtgtctttgtcaagatgtatgattacagtgttgaacagcttaaatgtccctcaataggttatagaacagaagagtaatagttgataatatttgggtttaaaattatacctatttatttatttatttattttttgagacagtcttgccctgtcaccaggctggagtgtagttgtgcgatctcagctcactgcaacctatgcctcccaggttcaagcgattctcctgcctcaacctcctgagtagctgggactacaggctcaccccaccacaccaagctaatttttgtatttttagtagaaacggggtttcaccatgtgggccaggatgatctcgatctcttgactttgtgatccgcccacctcgacctcccaaagtgctgggattacaggcatcagccactgagcccgccctaattatacccgtttagattgtgcacttttaaaaatgtctagaaggggctgggcgcagtggctcacacctgtaatcccagcgctttgggaggccgaggcgggcggatcacgaggtcaagagattgagaccatcctggccaacatggtgaaaccccgtctctactaaaaattcagagtagccgggcgtggtggcgggtgcctgtagtctcagctactcaggaggctgaggcaggaaaatgacatgaatccgggaggcggagcttgcagtaagccaagatcgcgccactgcactccagcctgggtgacagagcgagactccgtctcaaaaaaagtctagaaggatgtgcaccacactggggagattggaggtagttctgtagggaggctttccctttcacttgtctgtgttccagtttgcttggtgagcacacagcattgtgttcaggagtaggagctggcagagcacacttcctttggggaagtggtggaattaagtgatttgcttactaggatgggtaacttggaggggcaggtgactgtgtcatctaaaatttgtcctctagatgccccatcctggcccagaagggctggtttctatgtgggttgtgaagactttttctgccctcatactttaatttcacgcctcaaatttcccttgcttcctacatgttaacacaggcctgctccctgacatttgtctgggaatagcatatagaacccactggccattatgggtaagaagagaattgcgagaatgtgaccagggcactgaaacatctgatatctctaggacagatataggaagcacagatatagtctttcctttaacttataaaggtaaaaataaaagtattgtgaaagaatttctgcttgccaaagttcaaaggtcttttccaaccacttatgaatcccttgctcagatttcattttcacgcctagatgccagcattaacactgctatctgaatcgggccctcctgctagaagttgtttttattcaggagagcctactactgaatttctccagatgtcatggtcacagttctgttcccagtgctccattttccttgtcttcctctcttttaggtactgcttctccgagatggccccagtgtgtgcggtggttggagggattttggcacaggaaattgtgaaggtaaaacatcactgtggagcagaaaattgttaaccatgactttgtatatgtgctgacagagagaatggaaactgtcttagacagctgcctgctttctctcaccccattcatctttgtttcatgccctccccatttccacctcatcccattttctctggcccatccaggtgccattcagcaaatgaccttggagtgcctgctctgtgcttagctcacagttggccatagtgcctcgaaggtgtgatctgctctcccctaactgtattagttatccagtgcctgttgtattggtcagggattctgcttctcatagctctataagtgagtactatcatgatccccacttaagaggaagacacttgggcccatgaaagggactccagaacctgtgctcttaacctctgtacagtttatctctattcatcaccatgacatcaaagccctcccttttttttttttttttttttttttttttgagatggagtctcgctctgtcccccaggctggagtgcagtagcacgatctcagatcactgcaagctccacctcccgggttcacgccattctcctaccttagccttccaagtagctgggactacaggcgcctgccaccacgcccagctaatttttttgtatttttagtagagacagggtttcactgtgttagccaggatggtctggatctcctgacatcgtgatctgcccacctcagcctctcaaagtgctgggattacaggcatgagccactgtacccagccgcaccccccccctttttttttttttttgagacagaatctcactttgtctctcagactggagtgcagtggcatgatcttgactcactgcaacctccgcctcctgggttcaagcgattctcctgcctcagcctcccgagcagctgagagtacaggttcccaccaccacaccaggctaatttttgtatttttagtagttcaccatattggccaggctggtctcgaactcctgaccttgtgatcctcccacctcagcctcccaaagtgctgggattataggtgtgagccaccgcacccggccaagcccccgtctttttaaccacacactgtaggtatttgtagagaaatcagtttctgtgtccccatgaacacaccaggagcccctcaaggctctgtacaggatgacccgtgaccctgttaggtaggtgttagtgtgtctctcagaagggaagcatcttatacagggtcacataaccagtaactagcacagccttttgagggtcttctggaacatttgggttgctaaaactataccatacccccaaatatattgtacattctttgcagactttgctatttgcccgaagatgttaaatttgccttttgcaggttcttggctgccttcgtggactccggtgaggctttttccttctttcttatggagcagagtcgtgcctggttaaatgattggccatgtccatgtacatgtcaagtttgagcttgggaggacagtttggaggccagcccttaacactttgtcttggggtctgtacattctggaggcgtttggctcaatttgttagtcacaccgttttcctaaggctactttttttttttttttttgtctattttttctgatccttctctctggtctaaattcttcctttgatcaaatctaactttcttctatgtaatgggcaccgaggagatatttggagggggaagaaaagtgtgcaatggccatacctctttccttgctcacattttatacatagcccagagtgatgtgaaaattacagtttatatgcccaatctgagaagagggtaatggccacccagaggactgttcgagcaggattctgaggctccctgtagacaaactgcaggaaagagtgcagcaatgggaatgttctaagtggggaatgggaatgtacatatttttgtagcctaaaatgacgacaccaccaataatagacaagacttactgaaagcccactgtctgccacacaaagacagtgttttttacgtggatactcatttcatctcccaccggccctatgaggtaggaactcctgtgatccctggtttataaaagagagactaaggtgcaggaaagaagatgcttgcccaggctagtgagtgtggtgccaggatgtgggcccaggcagtctggtttctgagcctgtcctcttcaccacggggcagtcatgcatcaggtgttgccttcaatggcaccatcatgtagagactgcatggaccccagggccgctgcccttgcattgtcagccttacttctgcacatcccattgaggggctccccctaaatttttcatgtgggatggagactggaggttggggcaggtagccttgaccccattgttggtggtagtttctcacatccccatcctcacacagccccctccttcctgcctgctggagacagctggtgcccagcatcttgtttctgtttatcccagatagccagagtactctgcattcttcgttgctgggtgtgtttggaatctcctcctaccccatcttgcttgggaagcactttaccttttgccccatgtcaccccatgccctgctctcatccccagtactccttcatacttattactggtcagccttcagccagctggcaggcggggcctgcagtccaagggcctcagactcacctttctctcctgaggcactgtctgagcgcctatggaaagcttacactaggagatgggtcaagcgcaagtctgctcctttggaatcatcttttgcgtctttcctttcttacgtccttctagataccctattttatatccatgtctacttccttgggtttaaagcagttttcctttctctccatccccaccgtccacggcaggtctccctgtctatggtaagagaggtgatagtgaaagcagcagccatcccaggttcatggtaaaacacataccatctcctgtatcttgggtttgagggtctaagagttccacctgtgtactgttggacccttccacctggctaggttggtggcatccccagtattggtaaaggactcctggccctattattattaatagcagctcctacttactaagaatttactacgtgctcggcactttacaagcctagtcacatttcattctcaccaaaactctagcaggcaggtgctttttatttgcctatttgcccagagaagcaaacttctttctgatccaagctccatgtggacagagacctcagaatccttaatgtctagctgaatacctggcatagagtagatgcttaataaatgttcccttgactgggtgcagtagctcatgcctgtaattccagcactttgggaggattgcttgaacctagaagttcaagactagcttgggcaacatgaggagacctcatctctacaaaagtcccagctactcaagagggtatgggaggatatctggagctggggagacggaggttgcagtaagccgagaatgtgcctcccacctgggtagcagaacaagatcctatctcaaaaaattaaaaacatttacaaataaataaaatttccctggaaaaatggctgactaacactatttgtatatggtagatgtgattgtccctgttttatggatgaggaaaagggtttggtgctgagtttgaagaggagcagttcaggatgtgtagccccaccttcctcatgaatgatgggacggtgctcctgggaaccgttaaaccctgccctggcagcttgcctaggtgatgtcttcctctttaaatggtagcttgtggtgaaatttcaatcctttctgggttaaggacctgtttgaaaatttgtgacaattgtgaaccctttctcagaaagatgtatgtgcatacaagactcagtatgttgtttcgggggctgaccctgcctcaaaagacagggccacgtgctcactctccttcccacccctctctctcgctctctgttgcccaggctggagtacagtggtgccatcacagctcactgcagacttgatttccctggacttaagtgatcctcccacctcagcttcctgaggcactgagactataagcacacgccaccacatccaactaattttttttattttttgtagatatggggttttgccatgttgcccaggctggtctcgaactcctgggctcaagtgattctcccgcctcggcctccctaagtgctgggattacagatgtgagacattaagcccagccctgttcttgtattttaaagtgctctgtctggtaaccccacaagataatcaccattgccattgctaaatagcattgtccaggccctctggatcccagccctgaccccctgtggaagcctagcgactctatgtcctcatggaatagcccccgcttctgcatcagtgtgttccttgattaaatgtgtccccttaggtgataaaggccacagcctaagaactgccacctttctcagttgaatagtcatgaataattatttctgctgtttgcccaatggtggtgcaacacagtgttagtcattgttttagttttaaggtgtttttttgtttgtttgttttttgttttgagacagggtctcactctgttccccaggctggagtatagtggcactattacagctcactgcagcctcaatgtcccaggctcaagcgatcctcccacctcagcctcccgagtagctggcaccttgggcatgcatcaccatacctggctaatttatgtcatttttctttttctctttttttttgagacagagtctcactgtgtcgcccaggctggagtgcggtggcgcaatctcagtttactgcaacctctgcctcctgggttcaagcaattctcctgcctcagcctcccgagtagcatgccaccatactcggctaatttctgtatttttagtagagacaggtttcaccgtgttggccaggctggtctccaactcccaacctcaggtgatccgcccacttcagcctcccagagtgctgggattacaggcgtgagccactgcgccccacctattttagttttcatatagacgggatctcaccatgttgcacagactggtcttgaattcctgggctcaagtgattctcccacctcagcctcccaaagtgctgggattacaggtgtgaatgtgcctggccctggcctgttttacatttttgagatacatagtttaacccaggcaaatacatttcttaatctcatgttaggaaaataaggtaatgtttggagaggttaaataatctccccatggacacacagcttgtaagggacagagcaaggagataggacaatcaaaattgtctccagacattgccaaatagccctttgggagcaaaatcgaccccagttaagaaccactgccctagactgcttttagaatttttttttccctctattcctcttaaagcacttgagctaaaccctcttttcatttttctccccaggccctgtctcagcgggaccctcctcacaacaacttcttcttcttcgatggcatgaaggggaatgggattgtggagtgccttggccccaagtgaactcaagatttggcagccccagagatgccaactgcagcatgcccacctgtattccctgtccccttccttcatgaaggcatctccaggcaaggaaaactgaagtcattggcccgatacaaaacatttcctgcaacgaaggaggtggtgccgacgtgctgcttcccatcaccagcagctgctcgacaaggggcgcagggtggctgtctttgttccagcactgttcaggctgcctgtcatcccgggcctgccagctcccctgagtgatgagcacttccaagcacccctctgccctttctctgtccttatgctgtcccggcctcgccagccctctggggcattgtgggagatgcctgccaggaatgagcaagctctgttgctcgggagcctcttgtcaccttcttggacttattccccacctgataccttatagagaaaagtgtgaattcaggtggagagtaggcccaggccccatgaggcaccagtggaagcacagctccaagttcagacaggtgcccttagagaggaaaaccatgacaggcaaatgcatttcctctggagtttgagaccctgacaaacaacaggtggcatctggtgtgctgttcttgagttttcgtttaggattagttgagttccagctgggttttgggagaaaggagatgctaccaagtcttggatgttagggcgagaccctgcaagttgagtattagagagcttgtctttcaaggcaggttcctggggcttcagggctaggagggaggagcctgcccttttaacagaaccccagtcacatgcggctcaagtcactcagaggctgttgcatttcagggctatgttggtcctttgtttacctcctaaaccacagctgtttgtgtttcacatatgttgtgaattttccttggttctttttaaaggaatgataataaagttacttgctttaggatttgcttgtttttcttccacttcagaagcttctgagagggaatgggatgatcctaccagttgccttttcagacctgaggctctaactcaagagattcctcctctccctcaccattcctgccaccattttttctgggtgatgcagcaagagttaaattgttcacattctagaatgtgtagaagcttctggctccagttgtctaatggataattcagctaaatagtggctattttcagtggcaagaattataataataaagggaagtcaaaagtgatgcttcatatgccccaagtgccacagccgctacgggtcagagcttttattggaagaccaggtttgccttgatgcagccaaagtgcgttccagttcaccccactcttgcttgtgtttcttctttatgtaaattgtgtgatgtttcaataaatcagtctctttcctattctgatcctgcagcagttagtcggggagaaaagtggtcttcactacagaagggcctctgttcctcaaccctgcatcacctgctcccgccggaggtgagacaggggctgcatttcggaaaggatccgtgtctcgccacctttagtgcaagtcagtggcgtcagggtcagcagttacattgctgcatgaatttcacgtggtctttaaattctgagctaattatactcttgactgtaatgtgcagccttggtcacaagggggagcaggtgggtctggattgataaaaacaaaattgtagaatcgtcccggaagcttcaaacttttccaccctgtacctctaacggcagagattaagtcacccagaggacccctcaggaatcgaggggaaagctgccagccccaggcaagaaatgtctagtttctacaaatttcataaactgccacatgatgtttgtattaatcataaaaatgaagaaaaaaaggccaggcgtggtggctcacgcctgtaatcccaacattttgggaggctgaggcggacgaatcacgaggtcaggagtttgagagcagccaggccaacgtggtgaaaccctgtctactaaaattacaaaaattagccgggcatggtggcgggtgcctgtaatctcagctactgggggaggctgagacaggagaatcacttgaacctgggaggcggaggtcgcaatgagctgaggtcgcaccactgcactccagcccgggtaacagtgtgacactccatctcaaaatctgcagtcagtcaggcatggtgggaggctgtggcgggagaagcacttcagcccaagagttcgtgaccaacttgggaaacaaagcaagaccccatctccacaaaaaaagaaatagctgagcatagtggcttgtgcctgtggtcacagctgcttgggagactggggcaggaggatcacttgagcccaggagtttgaggctgaaatgacctggatttcaccactgcactgaagcctgggtgaaagagtgagacactgtctcgaaaaaaaaatcccagcactttgggaggccgaggcgggcggatcgcgaggtcaggagttcaacaccagcctgaccaacatagtgaaaccccgtctctactaaaaaaaaaaaatacaaaaactagctgggcatggtggcgcgtggctgtaatccagctactcaggaggctgaggcaggagaatcgcttgcacctgggaggcggaggttgcagtgagccgagatcgtgccactgcagtccagcctgggcaacagagcgagactccatctcaaaaaaaaaaaaaaaagttatcttgacgtatgttctattagctcattacaggtgtggaagagatggcttaggttgcaggtggtaagtttaatgataacaaccaatggtcattatacccatgcaacctgcctggtacttttcagaatccttgttctttgagttggaatccccacagcaaccccatggggatagatgctgttctcctacccatactggagataaggaaacaggctcacctcacaagcaagggagagatggaaatggcgctgactgggaaagctgcggtgcggggcactcagtagagattcatgtagtggcacggcttgttcgctcagtgagaacaagattttgggcttcccttcacaagtccctgagacccagtagtcactggaaaacatcatgtcggccttcataaaagagggccttcaactaggtccaaaagggtgggtggatttggttcctaagcttgtacgatattcaagcaatatacaagcataaagagaagattcctctccgctgcagggcacagcctgtcagcacaatgttggccacataataagagcagctgacttcacagctaaactgcattttggagagaaatatgagatgctttttggacatgttagctgtatccactttctttttttctttttcttttttcttttttttttttttaatagacggagtcttgctctgtcacccaggctagagtgcagtggtgtgatctcggctcactgcaacctccacctcctggtttcaagcaattctcctgcctcagcctcccaagtagctgggattacaggccccggccaccatgcccagctaatttttgtacttttagtagacagggtttcaccatgttggcctggctgctctcgaactcctgacctgaagtaatccacctgcctcagcacccaaaatgctgggattataggtgtaagccacagcgcccagcctagctttatccactttcatatccactccccggaggtcacccctgttaactgttgagagtgaatccttccagactgccatgttcaaacctagactctaccactcagccatgtgaccctcgctacactactttctgttaccccatccctaaaatgggtagaatagtggcacattcctcagatatgtggggattaaaaaatcagtctttgaatcaatattgctcaatgttagctgctattttacatattcataaataactttttctccaatgtgcttttttctcaatatgtcttggagatccttgtcagtatttcatgcatcaaattccataaccaaaacaggtgaaccattaactattgaatcagtctgctgctgtgtgacattgtgcacacttaggaaagacttcccaaagccaagttccagggttagcaagtataaaaatgcattttaggagttggttcttgttttttattttgttttgttttttgagacagagtcatgctctgttgcacaggctggagtgcagtggcgtgatctcggctcactgcaacctctgcctcccggattcaagcaactcctctgcctcagcctcctgagcagctgggaccacaggcgcccaccaccacgcctggctaatttttctatttttagtagagacggggtttcaccatattggccagtctggtctcgaactcccaacctgatgatctgcccacctcagcctcccaaagtgctgggattacaggcatgagccaccgtgcccagcctgttttgtttttttagtgatagggtcttactctgccacccaggctggagtgcagtggtgtgcaatcatggctcactgaaatcttgattttgagggctcaaagtgagtctcccacctcagtctcttgagtagctgggaccacaggcaggcaccaccatacctggctaattttttcccccggctaattttttttttcttttctttttcttttttttttttgagttggagtgttgctcatttgcctaggctggagtgtagtggcatgctctcagctcactgcaagctccacctcccgggttcacgccattctcttgccgcagcctcccgagtagctgggactacaggcgcccgccaccacgcccggctaattctttgtatttttagtagagacagggtttcagcatgttagccaggatggtctcgatctcctgacctcgtgatccacccgcctcggcctctcaaagtgctgggattacaggcgtgagctaccacgcccggcctttttttttttttgtatttttagtagagacggagtttcaccatgttccccctggctaatgtttttaaaattattggctgggtgcggtggctcatgcctgtaatcccaacattttgggaggtcgaggtggctggatcacctgaggtcaggagtcaccagaccagcctgaccaacatggtgaaaccccgtctctactgaaaatacaaaaattagctaggtgttgtccacatgcctgtaatcccagctactctgaaggccgaggcaggaaaatcgcttgaacccaggaggtggaggttgcagtgagccgagatcgagcagttgcactccagcctaggcaacaagagcgaaactccatctcaaaaaatatatatacatatttttagtagccatgaggtctcactatgttgcccaggcttaaactctggcctcaagtgatcctcttacctcagcctcctaaagtactgtgattacagatgtaagctactacgtctggctggtacttttctttcttttctttcttttttttttttttgagatgaagtctcactctatcgcccaggctgtagtgcagtggcacaatctcggctgactgcaacctccgcctcccgggatcaagcaattctccaacctcagcctcccaagtagctgggattataggtgcacgccgcccagctaattttttaatttgtaatttttttactttttatttatttattttgagacagagtttcactcttgtcacccaggctggagtgcgatgatgtgatcttggctcactacaacttccacctcctgggttcaagcaattctcctgcctcagcctcctgagtagctgggattacaggtgcccaccaccacacccaactaatttttgtatttttagtagagacagggtttcaccatgttgaccaggctggtcacaaactcctgacctcaagtgatccacccgcctcagcttcccaaagtgctgggattacaggtgtgagccaacactaccggccagaaatttacagatgttaaaggctcagtgaatcccaaacgggataaacatgaagaatatcatgtttagaaaaaacatctaggtggccgggtgcagtggctcatgtctgtaatcccagctgctcaagaggctgaggcaggagaactgcttgaacccaggaggcagaagttgcagtgagaatcatgtcactgcactccagcctgggcgacacagcgagactcagtctcaaaaaaaaaaaaaaaaaaaaaggaggccgggtgtggtggctcacgcctgtaatcccagcattttgggaggccaaggcctgaagttgggagtttgagactagcctgactaacatggagaagccccatcttgactaacatggagaagccctgtctctactaaaaatacaaaattagccgggcaaggtggcacatgcctgtaatcccagctacttgggaggttgaggcaggagaatcacttgaacccaggaggcggaggttgtggtgagccaagatcgtgccactgcactccatcctgggcaaaaagagcgaaattctgtctcaaaaaaaaaaaaaagaacctccatctccatgcttaaatacttgtgagcagggcaaaggccatgcagagagtgttcacacccagaccaacgccctgcttcgccttcactgcagtgcatgccatccctttggtagaggatgagacaccttcccataactggctcccctttctcataatatgtcttagaattattaacatggttgaatttaggtctaccatttgctttccatttgtcccacttttgttcccctgtttctcctttcctgccttctcttgaagtatttgattaatttttttttttttttttttttttgagacagagtctcactctgtcacccaggctagagtgcagtagcgcgatctcggctcactgcaacctccacctcccagcaagtagctgaggttataggctcccaccaccatgccagcgaatttttatatttttggtagagacaaagtttcaccatgttgatcaggctggtcttgaactcctgaccttaagtgatccacccacctcagcctcccaaagtgctgggattacaggcgggagccacctcactcagctaaatgttctaataaatacccatgtacccactattttgccacttgcagtttttattcatcattatctgtcatttttcttcatgttggtaaagctctagttcattcccgctaatggatgtatactattctgttgtgtgattacatcggacaaaaaaagttttttgttttttttttgagacagagtcttgctctgttgcccaagctggagtgcagtggcgtggtcttggctcactgcaacctccacctcccgggttcaagcaattctcctgctttaccctcccaagtagctggggttacaggtgcccactaccacaccggccaattgttgtatttatttattatttatttattttttattctttttgcgtctcactctgtcgcccaggctggagcgcagtggcacaatctcagctcactgtaagctccacctcccgggttcacaccattctcttgcctcagcctcccaagtagctgggactacaggtgcccgccaccacccccaggtaattttttgtatttttaatggagatggggtttcaccatgttagccaggacggtctcaatctcctgacctcgtgatccgcctgcctcggcctcccaaagtgctggaattacaggcgggagccaccacacctggccctatttatttttaagacggaattttgctcttgttgcccaggctggagtgcaatggcatgatctcggctcactgcagactctgcctcctgggttcaagcgattctcctgcctcagcctcccgagtagctaggattacaggtgcttgccaccactcctgggtaatttttgtatttttaatagagatggggtttcaccatgttggccaggctggtcttgaactcctgacctcaagtgttccacgtgcctcggtctcccaaagtgctggtattataggcgtgagccactgcgcccggccgatctttcttcttttttttttttttttttttgagatggagtctcgctctgtcacccaggctggagtgctatggcacggtctcggctcactgcaacctccacctcctgggttccagcgattctcctccctaagcctcccaagtagctgggattacaggtgcctgccactatgcctggttaatttttgtatttttagtagagctggggtttcaccgtgttggtcaggctggtctcgaactgctgacctcatgatccgcctgccttggcctcccaaagtactgggattacaggcatgagccactgcgcctggctgcccggccgtatttttattgttttttttgtttttgtttttttgttttttttgagacggagtctcactctgtagcccaggctggagtgcagtagcacaatctctgctcactacaacctccacctgccgggttcaagcgattctcctgcctcagcctcctgagtagctgggactacaggcgcatgccaccacgcctggctaatttttgtatttttagtagagatggggtttcactatgttggccaggctggtctcaaactcctgacctcgggctcccaaaattttgggattacaggtgtgagccacctggcctggccaccacatgggactatttaccctaccaactgctgttggatacttagatggttttgtgcattgccagtacttggatacttgtatgcacccgtgttcctctaagggggacgcccacaaaagctattgctgccacaaggtatgtgcattctcatcttgacaccatgtcttagtctgttttgtcttgctgtaacggaattgcacagactaggaaacgtgtaatgaacagaaatctgtctgggcgcgctggctcacacctgtaatcccagccttttgagaggccaaggcaggtggatcacttgagatcagtagttcaagaccagcctggccaacatggtgaaaccccatttctacaaaaaattagcccggcatgttggggcatgcttgtaatcccagctactagagaagctgaggcaggagaatcgcttgaacccaggatgcagaggatgcagtgaactgagattgtgccactgcactccagcttgcgagacagagtgagattctgtgggagacagagcgagactccctctcaaaaaaaaaaaaaaaaaaaaaaagagaaatctatgggctcacaaatctgaaggttgaaaagtcccagatggtggggctggtatttggtgagggccttccggcttccttgtaacatagcggaaggcatctcatctgagacagaggggtgaactcattctttataaggaatccattcccgtgaaaactcactcacttccatggtcatggcattagtgcatttctgagagcagagccctggtgacgtaattatctcttaaatgtctcacttctaaaatctgtagcactgcaggttaaatttccaacccaagaactttgggggacacattcgtatcccaacacacggttttatcaaatgcttctccaaagtgattgttgccagttaccacaccctggccatccagatgggccatttcccctagtgtccctttagcagcaaggacagttgggaaagggtggagctgggactgaccctgtgtctgtaaatattatataattatataccctgcttcagagtccccctctgttgccctggagtgcagtggcatgatcatagttcactgtagcttccaactcctgggctcaagctatgatccccctgcctcatcctcctgagtagtgggtactataggcatgtgccaccatgcccagcgaattaaaaaaattatttttgtgtgtgtggagatggagtcttgctatgtttctaggctgttctttttttttttttttgagacggagtctcgctctgtcgcccaggccggactgcggactgcagtggcgcaatctcggctcactgcaagctccgcttcccaggttcacgccattctcctgcctcagcctcccgagtagctgggactacaggcgcccgccaccgcgcccggctaattttttgtatttttagtagagacggggtttcaccttgttagccatgatggtctcgatctcctgacctcatgatccacccgcctcggcctcccaaagtgctgggattacaggtgtgagccaccacacctggcctataccttgcttctttctctttctttccttttttttttttttctggagacagtctccctctgtcgcccaggctggcgtacagtggtgcaatctcggctcacttgcaacctctgcctcccgggttcaagggattctcctgtctcagcctctcgagtagttgggactacaggcttgcatcgccacacctggctaatttttgtatttttagtagagacagggtttcaccatgttggccaagctggtctcgaactcctgatctcaggtgattcgcccaccttggcctcccaaagtgttgggattatgcccttccttccttccttccagacagggtcttgctctgtcacctaggctagaatgcaatggcaggatcttggctcgctgtaacctttatctcctaggttcaagcaattctcctgcttcagcctcttcagtagctgggattacagacactcgctaccacgctcagctaatttttgtatttttagtagagacggggtttcgccatgttggtcaggctcgtctcgatctcctgacctcaggtgatctgcctacctccctgcttctcattgaggtctctgccagtcaggtatcagcacagggaaagggctcaagggcagtgtgtggccatggccctgtttgcagaagatggcagtaggagcaaccctttctacatttactcaacacagccgcttatgaccagcctggttaggcctcagggcagtgtgcggagactcactgtgatcttagctccaggtgctcctccagctggagaggcagcctacggctgatcacagtgcaaggccagatgtccctttctgtctctgtgacggcagaaacgaggtctgtctcatgactctatcccaagcacttgtcacagtggtgcctctgaatatgttacgggtcattcactcatccattaaatatcaagcgcccctacaacacctcatggggacttcactttttattttgtttttgagacagggtctcaccctgtcacccaagcttgagtgcagtggcttgatcatcgctcactgcagcctccaattcctgggctcaagtgatcctcctgcctcagcctcctgagtagctgggactacagacacacaccaccatgcctggctaattttttttatttttttatttttgtagagacggagtttcatcgtgttgcccaggatggtcttgaactcctgggttcaagagatctacccacctcggcctctcaaagtgctgggattacaggcatgagccatggcaccaggccaagcttcacttttaccgggaatggggatgatgaaggctaggagcgtcccggtctggagaagcccaggccccttagcctttcttctgatggagccacaactgccagggcccacctctcccacccactcacaagcagggctcacagagcagagcccccgatcagaagcctctccaaggccaggctgcagggaaggcaagcagaaagagtatccactgttccaatctgattttattgaaaaggaaacatacaaaaatcatgtacaaaaaaaattaaccaaacatgtacagaaaattcattccggtatctacagcagcgcatatacagtatcttacaggctgggccatccctccccactcccagactcctccctcttccgagatttccccccctccctgactccccgtcttccccccagcgcttggccctggggactaaggctggggcggcttcagccaaaatctcccaccccccaaatgaatgccagtggtcacacgtgctctctctaaacctatgcaatgggattgatggggcggggggcggtcacgggcagagcacaggattcacagtctgggcccctcctggccaccccctgatgaaggtgaggcaggcatgcccaccacccgccggctggctcagggaagatggctgggcgccgggctggagcaaccggcaaacgagccccactctctggctccaggaggctagtggtcacgtttggctcatttgctcttcacgggccccctcccaggaggagggggggaagcaccaggggcctgaggccaggcccagagtgaaggagcaccgagaggagagcccccccctcccagtgtcacccctgcagctggaacgggcaccagcacaacagcctttcctgagatggtggtgggcggcagaggcgggcggctcagtccccaccccctcggtcaccgccaccttccgatgctgagtccatcagccgtccctctcctggcttcttggccagggacccaggagtccgcatctccgtcagtgcaccccaggctgggctggggctggagtggctgccccggcccgcccccgggacaggcagggctgggagtccagtatgctacatggtgcagagaaagtcccccgcgctggccagggtgtcaggaggtgggaggggcctgccccccgagtccctgacgtccaccgggcgggtgcaggcacctaattgggctccatctcgggggctctgtggcccctgggtaagggcaggagtcccatgatgagattgtacaggaccctccagggtgaggggcggtgccgctgctgctcctcttgtctctggggaaaagagagagaaggggcagttagcaggggactgagtatggtgatgggagtggggatggtcagctccaggggcagcgaggcgacagtctcgcccaccctattccagctcctccccccgcctgggctaatgtccatgtctcggaggtcacatcctcatccaggacatgagacctggaggcagaggacaaacacggaatgccttcagcagagagctgggcaccaagcgagtgcgtggcacattagctgtgactgccccgtctctgttgtacatttgagaaagacatcccccaaggggctgaaggatggactgcaacctatcctgcccctccctacagggctggcaagatgaggagaaaggagcagggtgcccacagtcttggcagttctagaacaatctgtggaaggaggagaactgggaagagccccccccattgcagaggcttcaacagaagcacctctaggcaacgccgagtgaaacccctgccccctctccagtggcaggatgaaaacaaggtggtctctaggaccctctcagctccaacatcctaggaagtgggcaggcaggaggctaggtcctaggaaaggctcccgactggtaaaaattaaaggcaatactaaaaagagtacagaggcccggcgcagtgacttatagctgtaatcccagcactttgagaggccaaggcgggaggatcacctgaggtcaggagtttgagaccagtgtggccaacatggtagaaccccgtctctattaaaaatacaggccgggcgcggtggctcacgcctgtaatctcagcactttgggaggccgaggtaggcggatcacctgaggtcgggagtttgagaccagcctgacctacatggagaaaccccatctctactaaaaatacaaaattagccggacttggtggcacatgtctgtaatcccagctacttgggaaggctgaggcaggagaatcgcttgaacctgggaagtggaggttgcggtgagccgagatcgtgccattgcactccagcctgggcaagagcaaaactctgtctcaaaaaaaaaaaaaaaaaaaaatacaggccgggtgcggtggctcacgcctgtaatcccagcaccttgggaggccgaggcgggcggattatgaggtcaggagatcgagatcatcctggctaacacagtgaaaccccatctctactaaaaatacaaaaaaattagccgggtgtggtggcgggcgcctgtagtcccagctactccggaggctgaggcaggagaatggcgtgaacccggtaggtggagcttgcagtgagccgagatggcgccactgcactccagcctgggtgacagagcgagactccatctcaaaaaaaaaaaaatggctgggcaaggtggctcacgcctgtaatcccagcactttgggaggccaaggcaggtggatcacctgaggtcaggagttcaagaccagcctggccaccatggggaaaccccgtctctactaaaacaacaaaaattagctgggcctggtggcacacacctgtattcccagctactagggaggccaaggcaggagaatcgcttgaacccgggaggcggaggttgcagtgagccgagattgcaccactgcactccagcctgggcaacagagcaagactccgtgtcaaaaaaaaaattttttttaagtgtacagagagctgcaatcctctgccactccctgtagctccacaggcaggctctgtgctaagtggggaccacctaacctccttcccttcaggtgcaggggaaggagaaactcactttacagaaggttaaatgatcctcatcgtcctcatgctacctggtagtgagtcgcctggtaccagcccagcctcctcaacactccctagcaactcttggggccaggagatggtggcaaagggggcacatcggattggtgtaagttacaaaacccaccactgtcacactgctgtgggtgccacctggtgagaaagctagcaatcacctagtaaggtggatggtgggcagaccacccaggtacctactctagaaacacaagagcgcacccggaaatatgcatgattgggagaggaaaaaaggcaataaataatggccgggcgcagtggcttacacctgtaatcccagcactttgggaggccgaggtgggtggatcacctgaggtcgggaattcaagatcagcctggtcaacatagtgaaaccccgtctctactaaaaatacaaaaattagctgggcatggtggcaggcatctgtaatctcagctacttgggaggctgaggcaggagaatcacttgaacccgggaggtgaaggttgcaatgggccgagattgcaccattgcactccaacctgggcaacaagagcgaaactctgtctcaaaaaataaataaataaaataaaatctgaaatacatttaaaaatagtctgggtgaggtagctcagacccataattccagcaatttgggaggccaaggcaggaggatcacttgaggccaggagtttgagaccagcctgggtaacacagaaagacctgatctctacaaaaaaataaaataaaaattagccaggcatggtggatctgcctgtggtcccagctacttgggaggctgaggcgggaggatcccttaaacccaggagttggaggctgcagggagctgtgattgaaccacggcactccagcctgggagacagtgagaccctgtctctaaacataaaataaaaatacatatctatcctaaatatccatcaatgagaaaatgaataaggatactatgtttatccaacagaatactatgtagcagtgaaaatgactttttttttttttttttttgagacagagtttcattctgtcctccaggctggagtgcagtggcatgatctcctgatctcggctcactgcaacctccacctcctgggttcaagagattctcctgcctcagtctcccaagtagctgggattactggcgtgtgccaccatgctcagctactttttgtttctttttttttttttgagacagattttcgctgttgttgcccaggctggagtgcaatggcacgatctcggctcaccgcaacctctgcctcccggtttcaagcaattatcctgcctcagcctcccgagtagctgagattacaggcatgtgccaccacgcctggctaattttgtatttttagtagagacggggtttgttcatgttggtcaggcttgtctcgaactcccgacctcaggtgatccgccctcctcagcctcccaaagtgctgggattacaggcatgagccaccacgcccggccttaatttttgtatttttagtagagacgaggtttcaccatgttggccagactggtctcaaactcccaacctcaagtgagccacttgcctccgcctcccaaagggctgggattacaggcgtgggccactgcaccaggccgaaaatggctgtatttgttgtttcttttttgagatggtcttgctctgtcccccaggctggagttcagtgacccttcatggctcagtgcagcctcgacttccttggctcaagggaccctttcacctcagcctcccaagtagctgagactacaggcccgcgccaccacacccggctaatttttgtattttttgtagcaacggggatctcattatgtggcccaggctggtctggaactcctgggctcaagcgtccttctatctccgcctcccaaagtgctgggattacaggagtgagccaccgtgcctggctgaacatagatgaatggaagctcttttgcccatatggtgaatctgaagcctaatattgagggaaaaaggaattctggggagaaacaaaaactatgtcatatacgctaagctaagaatgctccatgattctaagccctggttctggcctggtaaatacggagtaaaagcaacacctgcaggggttgagagaggccaactcgagagatttcctttggatgcaaggagggggaagggatggggagagtaaggagcttcaccacatgcgtttctgcggttttgtttggtttcttaataagcaagcaatgcgggtgtaatgttcaaactgaacagagctgcctggtgggcgcatgatgtttgtgatttcccattctctgctgtgggcttcgaatatttgttttaaaaaatcgaggccgtgccaggggctggggggcggggcctcccgcggggcggggctgcgagcccacccctgcggtccccggcccgccccggcgcccgggaaactgtgtggcgctgcgggccgcgcgagagggacggcagggggcgggcgcggcgcggctgctgactcaccggctataaatagcccgggatatatgagccgcgccgcccagcgccgccctcagtccccgcggccgcgggccacgggcgcgcagctccactcctcggcggcctagtccctggccctggccctggccctggctcgggctccggctatgccagccgcggcgcggagtccttgggcggctctgcgggcgcgcgattcccccccacccacttaccccccacctgcctgtccgcggagcgacccagccgcgcagggcagcagctgccgcacatctggcgggggccgcctgccgccccctcctccggcggaagtcccacctgccgtctaccccacccccagcactcacccgccgctcgtactgtgcgttgaggtcgtccgccatccgccgcagctgggccccgatctcccgggcccactgttcctcctccccgcggactcccggggccgcctgggtgggaccgcccgccagagcccccggggcgctgggcacgggcgactccaggtgctgctccgccagcgagagcgagggctgaggaccttggagaggcagaggggcgcggtcagcacccaccacccctccaggcctcgaggtgtctcggcctgctcccctctttcccagccactgctccccgcctcatttctagtgatcccatcgctagtgagtcaatttctcagcttctcctccacaggcaccagaaagcaagaagtacctggggacgccgctctggggtcacctgtctggccagctacgtccccacggcccttgtcagtgtggaaggtagacggccagagaggtgaccccgggggtggtcaggcttaacgacctctattttccaaaggggccacattttgccttttccatgtgacaggcagggaaactgaggcccgcccttagggagtatcccaaggtcacacagggatacagtgactgaccccacccagatcacaagcctcaggtctcctgccctctcgtgtccaaccacagggaagccacacctccggatgtggcagaggcctagagaccagaaggccagagactgtggcagcttcagagcgcgggcctggggggctgggacgcgggagatgccttcctgccccccccccccccccacttctgagcgccctaggaggctcctgccctcccgtcccaccaggtcctggcctgagggttccctaaggcctacagccagggcctcagtttccacatctgtgaccttggccttgaaatcggtgtccccttccagggcttccaggaactgagttagggaagttttctctttcctcgctccccttgggctgccgggacaagatgggggatgggaaaccaggacacactttccctagagcgcctgccggcagggatggggctccacgggcaccacagggttaacagcccatcaggcaggggacctttaacccttccctccccaagactcccccacctccccgaggggacttcccaacacaatggcccctccccctctccttcctccgccgggactgctgaggacagcccctggccaaagagatgcaaataaaagcaaaaggcctctcgacccctccccagaggccagagttgacagtcctcccgctcggcccactctccctgcaacaggaatcctccagggggtctagaggacccagactgggggaggggagctgggatgcagctgttgccccaggcccggaagagacagtgggctgcaattcggggactgcagtcagattccaggagggacttcccacttgacctccccctccacccccagcctccgtcttcctgcttcttgcaacacaaagaccacattggccacaccctcccagtggcccggctgggcccgccacctccccccgtcctctcccacttctccagttcctccgagtctccagccctctctcttcccggctcctatcaccccgggggcggggcgggcactcaccgtccgggcgcgggcctcggggccggctgcggggacccccaggccagcgggaaccccccagggcggcggtgacggcgggtggggcggtgggggcgcagaggtaggcagcgggcagcagggtgggggcggcgggggcggcagccaggccgggctcgcagaggccgcaggacactgccgagggcaccaggcggccgagcgggaaggggcgcgggccgtcgcgggccaggccctctacgggctccggggagctgccctcctggcgtgcgcgggccatggcgctccctggggcctgcgggacacgggaggaggagcaggtcagcagggaagtaccagggcccactgtacctccagcctacccggggttaggacccagatggagaagagtggaggtgtgtgtgcatgcggagggggtgacggccccacagagacacgcccagccgggggatgacaccaccgggtcctggctggcctggagagcctcccgtgcatacggtgatgggcacacaggagggacagggggcacaggacggctctcacagcaaggacagggctcacacaggacggatggaggggtctagcaggtgtgtgtatgagggctgtgacagtcccacaacacaaactcactccacttgggactcacagcatgggctggtggggacaactttcccaacacagcgacgggcacacagggagggcagtgaggcacagcgaggcccccacagcacacacacaaggactcacacgggactggccagcctgaccgcccaccccacctcccacttgcacacaaacactgagatggccccagtctcggacatcactactcagtacacacaatacacacacacccccgaccaaagcaggagcatccagacagaccatcacaagcactctacatactgcgcacactggctggcacaatccatccccacacatccaaactgtcaaagtctcacacactgacccactgttgatatgcccaggggcacatgcaaacacaatgcagcctttgcaaacacaaacacacacacacaagctaggcactgcctcagttcccaaacatgcccctctccacacacacacactcactccagagataagacctgcacacctctggactcacatatcaacacaaaacagacacccacggacacacatacatcaacacccccaaaacacacccacatgtcaccaactctcaggacacacgtagatcaggcacacacagacacatgccatcagacctcaacacaccaccagacaccaacccaccctcctcacgcaaccctcaaacatcatcaccaactgtcagcaacacacacacacacacaccctacagctaactctaatcccacacagcccagcagcacacacacctagcgcacccacagaaaacactggtctcacgtgactgacataaacactacacacacgcagcccacatgacacacatgagccagccgatcacagtgacaagcccctcagacccaacacacacacacacacacaggctcagacacaaccccatccagaggctgccagcaacacccaccgtctacactgcatagaccccacagatcctgggtcctcaaatcccagacgctgatgccagacacacaagccaaacccagactgaaacaaccccccaccacacacatacatacacacacacactcacacctgacaactcacacagacacctggacagaaaacagacatttgcatttagcaggcgcagcatcacaaacgctgggcaaaagacacatgccccggagatacagagacggcctcagccaagacagaaacacacaggcaagacacaagcacacatatcgcacgctcgggcaagacacacacataaacacacaaacagctcactccagcaacacacacacactacaacctccacaccccagcacacgcaggcaccacagacccccagtatcatcccggaacagcacacacagacaactctcaccgacaacacacgcaggtccacccaccccacaagcagggcacccacagacagaaccccacacaaacaggcgcggggactcacgcagacaccccgacgggtcagaaaccccaacattcctctggatcgacaccaccactccctgcagaacccagcacaaactcggagccagacacgcgcacacacccaggcgagacacctgcagatccacaaccccgcacacgcgcgctcccacggcggtcccagacacccccctccgctgtcacagccccccccaccgccgccacgtgcgcccgccccgcccgccaggcgagcgcggggccaataaccggctgttgctggggcgcagcccccgcccgcaggagccgcagactccacggcccgcgagccgccccccgtcgccgcccccagcgggcgcgcgccctgggtgtggccgcccctccgtgccgcccccccgcccctcccggactttgggggctggggcacccctggggtcgaccctcttccccggggccgcactggccgccagggggcgctgccgagcccgcaccccattgtttgtaaacaaacccgccagaccgccgaggcacctgtgcgcccagaccggcgccccaacgccgagccgcctctcacccggcgaccctggcccagggtccctcgcggggtttggagaggcgcggtgtggggaggcagggcgcccacactgctctccgcctgcactcctgtcacctcctccagggagtccacccggcctggccgatcgccgccggagaggattcggggcgcgcacactcaccccgggggcatgaacacgccggagggggcggcggtggggggcgggcggcttccttcaggagggcgcgcccgccgagcgccgctctccgcggcggctgctgctgtggctgtcgctgctgctgccgctctaactgcagtggcggctgctgtggctgtggctgctgctgctccccgggccgcaggcgcgtccgcgtcgtggccgctgctgggatcgctggtgccgccgccgccgccgccaggcgcccgctcgcatgtggctcgcgccgcgtctcaggccgcccggcggatcccgggcccgctccaaagccgccccgccccgccccgccccgcccccgcccggcgggtcccacgccccgcccccgcgtgacgctacggccccgcccgcccgccgcggacaagtcaggacttgcaggcgcgcgccgcgcccccccctacctccgcgccgggggtttccctgcagcgggggacggggcagggcctagcccaaggcaaggaggacccaggcgctgtgcggcggggtgtggggagatcgcccagacaccgggacagtcggacacacacactgactgggacccacagatccacacccccagcgatgcgtacacagaccgaccgacgggcgttccagggtccacaaagtcacgtgcaggcagagcccagaggatgtactcacagacacaaggccacagtctcgcaaatccacaccatggacaggggcatgagcacacacactcacatactgatggggctcacacttacacacacccagacggaaatgcacagactcactaacagggtcccctggacaagcagacggacacaatgacagggccacacacagttgcagaaacacccacactgatgatcacacctgggcccacaaactgtgttcacaaacaaccctaccgaacaggcacccacaccacacacacggtggtgcaaccacacagacataggcggagtgcttatcaggaaacacaaacttgctgataggcacaggggacacacacatacacacagacacctgttacagggatacctggatacacggccaaatccaaatcacactcccacagggacatacacaaatgcactcacacaatttcacagctaacacattaaaactatcagaaagtgacattcgcccgacacggtggctcatgcctgtaatcccagcactttgggaggccaaggtgcgtggactgcctgaggtcaggaattcgagaccagcctgaccaacatgatgaaaccccatctctactaaaaatacaaaattagccgggcgttgtggcgcatgcctgtaatcccagctacttgggaggctgaggcaggagaactgcttgaacccgggaggcggaggttgcagtgagccgagatagtgccattgcactctagcctgggcaacaagagcaaactccgtcttaaaaataaaaataaaggaaagaaactgacattcagagacacaaaccaaatcagacatagaagaaactgaccacccacacatgtcacaaagtcacacctgtgacagcttcttgctaactggcccactgcacacacgtcggagcatgcacacctggccacactcaccacaaatctggcaggggacccacgtcgtggaagcagccctgggcacctggcatggacatgcctgggcagaccccatgccaaatttcatcctgtctcatagctttccattccgtttctttttcagtttctcattgttacttcctgccctgctctggtttggtgagttttgtccttcctttttccaaagccgtggattcctgtctcctctacactttccatccttactgggtctcacccaatcgcaatcgcctcaccagagtgactcaccttccagtgcctagtgtggggctggctgagtaaggatgtcagacttctcaaacttgactgcctccaagtacacactcttagctcccccaagagatgcaggtaatctatatctcacgtgaaatctccccatttgcaacattgggaactcctcagctttcctccctctttcactttccctcctctttcgctttccccgattattcattgtcccttccttcttcctggtgttttccaaactgtgggtcatgagtaaaccatggattatgacatatgacatcacttacatggatcttacttttttttttttttttgagacagagtctcgcgctgtcgcccaggctggagttcagtggcatgatctcggctcattgccacctccgcctcctgggttcaagcaagtcttctgcctcagcctccctagtagctgggactacaggtgtgcgccactatgcccagctaatttttgtattattggtagagatgcggtttcaccatattggccaggctggtctcaaactcctgacctcgggatccgcctgtcttggcctcccaaagtgctgggattacaggtgtgagccactgcactcagcttttttttttttttttttttgagacggaatgtcactctgttgcccagactggagtgcagtggcacgatctcagcaaactgcaagctccgcctcccaggttcaggcctttctgcctcagcctccccagtagcagggagtacaggcgtctgccaccacacccggctaattttttgtattttttagtagagacagtgtttcaccatgttagccaggatggtctcgatctcctgacctcgtgatctgccctcctcggcctcccaaagtgctgggattatggcgtgagccactgcacctggcccagccttttttttttttagataaaagattcactctgtcgcccagattggagtgtagtggcacaatggatagccttgtggtacaatagccttgcagcttcaaactcctgggctccagagatcctcctgcctcagcctcccaagtaactgggactacaggtgtaaaccaccacgcccagctaatttttatttttttgtagagatgggcggtctcgctatgttgcccagtctggtcttgaccttatgggctcaagcaaacctcctgcctccgcctccctcagtgctgggattacaggtgtgaaccaccatgcccggctgacttaatgcattttactcagtaagatgcattcacatcccaaccaacttgcgctttactgagatgtatttagacacaagaatattcactctttttaggtgtatggtgtgtaagtggtgataaaagtacacaattttgtattaccacaacttctacctgcaattttactgacctagacaagaggttttgttgttgttttaattgagacagattctggctgtgttacccaggctggtttcaaactcctgcgctcaagcgatcctcccacctcagcctccctagtagctgggattataggtgtgcatgactgctttgaccagagttaaaaaaaaatacaccacaggccgggcatggtggctcacacctgtaatcctagcactttgggaggccgggggacgtggatcacctgaggtcaggagtttgagactagcctggccatcatggtaaaaccccatctctactaaaaatacagaaattagctgggcatggtggtgggtgcctgtaatcccagctactcgggagcttgaggcagaagaattgcttgaacccaagggaaggaggtttcggtgagccgagatcgcgccattccattccagcctgggcgacaagggcaaaactccgtctcaaaacgccaacaacaaaaatacactacaggctgggcacggtggctcatgcctgtaatcctaacactttgagaggccgaggcgagtggatcacttaaggtccggagttcgacaccagcctggccaacagggtgaagccccgtctttaccaaaaatataaaagttagccaaaaattggtggcgcacacctgtagtcccagctactcgggaggctgagacgggagaatcacttgaactcaggaggcagaggttgcaatgagcagatatcgtgccactgcactccaaacagggcaacggagcaagactctgtcaaaaaaaaaaacacactacaaaatacaattttgaggccgggcataggggctcacgcctgtaatcctagcactttgggaggtcgaggtgggtggatcacctaaggtcaggagttcgagaccagcctggccaacatggtgaaaccccgtctctactaaaaatacaaaaattagccgggcatgattgcggtgcctgtaatcccagctactcaggaggctgagatgggagaatcacttgaacccgggagacggtggttgcagtgagccgagattgcaccactgcactccagcctgggtgctgagccagactccctcttaaaaaaacaaaacaaaatataattttaaaaaattatgaagtcaacggaaagtaatattttgtggaaattttattgatgtatagtgaatacatattaggttacaaggaaggtatttttctggccatagatcgagttcaaagacgtttgagaaatgctgctttagacacttattaaatgagatcacactggaagtcatttagtgcagtattggacatatagtaagtgcctaataagtgttagctattatcacttgtataactaattattgtcagtatttcctgttgcttgacactgatgaagttgagagaggggcagtctctagccctctgctagctcatggtcccacctgtacctcacacctctcactcactgatcaatgtccagactgcccattgcagggtagatactcggaggccagatgtactggaatgttctttttttttttttttttaagacggagtctcgctctgtcacccaggatggaatgtggtggcccaatgtctgctcaatgcaaccaccacctcctgcgttcaagtgattctcctgcctcagcctcctgagtagctgggattacaggcacctaccaccacgcctggctaattttttttgtatttttagtagagacggggtttcaccatgttgaccaggctggtttcgaactactgatctcaggtgatccacctgcctcagcctcccaaagtgctggaattacaggtatgagccactatgcccagcctggaatgttctcttcttctcctcctcctcctccttcttcttttttcttcttcctcctcctcctcctcctccttcttctccttcttttttcttttcttttctttttttagtaaagatggggtctcattatgttgcccaggttggtctcaaactcctgggctcaagtgatcctccctccttggcctcccaaagtgcctggattatggtcatgaggcaccatgcccagccccggaatgttctttatttgtttgtttgtttgtagagacagggtctcactatgttgcccaggctggtctcaaattccagacctcaagcaatcgttcctccttgacctcccaaaatgctgggattacaggtgtgagccaccacaccggcctataatgttcttttgagaagaaaatgagtgtgaaggatagtgggaatctggcttggtggctggaggtagaaaagatggggagaggccaagagtctatttggccataagcgttatcactagtcaaaatcctccccacagctgggcgtggtggctcacgtctgtaatcccagtatcacggaaggccgagatgggtggatcacctgagcccaggagttccagaccagcctgggcaacatgcggaaacctaactggggaggctggggtgggaggaacgcttgagcctgtgaggtcgaggctgcagtaggctgtgatcgcaccattgcactccagcttgggcgacagagcgagaccctttctcaaaagcaaaacaaaacaccagcctggccaacatggcaaagcctcgtctctactaaaaatacaaaaattagctgggtgtggtggcacatgcctgtaatcccagctactctggaggctgaggcagaagaatcgattgaacccgggaggcggaggttgtagtgagccgagatcgcgctactgcactgcagcctgggcaacagagcaagactccgcctcaaaaataaaaaaccgacccccacccccaaaacaacaacaacacaaaacccttgtgggcaaagaaaaagaagtttgtgggtgggtcaagggctgcctctttttttttttttttttttgacagggtcttgctctgttgcccaggctggagtgcagtggcatgatcacagctgatgatcacagctcactgcagcttccacctcctaggctcaagcaattctcccacctcagtttcccgagtagctgggactacaggtgcacaccaccacacctggctaatttttaaattttctgtagagatgaggtctcactgtgttgcctacccaggcatgtttccaactcctggcctgaacccattcgcctgccttggtttcctaagcccgcatgcagccctcatgaaagactgtgggctgtgagtccagatggcctgacttagaatcccctctgccacctgtgggtgatgttggggaagtggtcacagctctgtgcctcagtttcctcatctgtgagttgagacagcacaggtccctacctcataggatgtgcagtcagaatgtgaataacaataaaacattgggctaggcacacagtggctcatgcctgtaatcccagcattctgagaaactgaggcaggaggattgcttgagcccaggagttccagaccaacctaggcaacatagtgagacccctgtctctacaaaaaatttaaaaaataatcaggcgtggtggtgtgcacctgtggacccagttacttgggaggctgaggaaggagaatggctggagcccaggaggacaagaccacagacagctgtgatcccatcactgcactccagcctgggcgacagagcgagactctgtctcaaaaaaataaataaataaaataaaaagaccctgttttataaataaataaacaaaaaaaaattaaacaataaaagtactggggcatgatggatgtttaatatatgttacttgtcattactattaccagtgtgggagtccgttgactctctgagaatccaagcaaggaaacctctagctaaggacccctccgcctcttttatgagaacagggtctcactctatcacccacgcttgaatgcagcggtgtgatcttggctcactgcaacctccgcttcccaggctctggtgatcctcctgcctcagcctcctgattagctgggactacaggcctgtgccaccacgcccagctaatttttgtatttttagtaaaaatgaggtttcaccattttgcccaggctggtcttaaactcctgggctcaaatgatcctcccacctcagcctcccaaagtactgggattacaggcatgaaccactggacccggcctggacccctattttttttttttttttttgagacgcagtctcactctgtcacccaggctggagtgcagagtggcatgatctcagcttactgcgacctatgcctcccaattctcctgcctcagcctccttccagttcaagcgattctcctgcctcagcctcctcccagttcaagcgattctcctgcctcagcctcccgagtagctgggactacaggcatgtgccaccatgcctggctaattttttttttttttactttttttttttttttgagatggagtcttgcttgccctgtcacccatgcttgagtgcagtggtgcgatcttggctcactgcaacctatgcctcccaggttcaagcgattctcctccctcagcctcctgagtagctgggactacaggtgtgcaccaccacgcccggctaatttttgtatttttaatagagacagggtttagccatgttggccaggctggtcttgaactcctgaccccaggtgatccaccggcctaggcctcccaaagttctgggattacaggccgtgagctactgagcccggcccaggacccctatttttatggggccaagatgcctgcattctcttctgggaaggatcatcagccctgtgttcaaaagccatgatgcctgaatccagtttggggagagacagcaagtccctgtgttcatggggtcaggatgcccaggtctacttctgggaggaggacagttcgtgtctatttgcacagatgctcatgttgaggctggggtctcaaactagtggtccgcaggccgtccacgagtgcgttttcttgactctgtgcagtttcgtattttgagtgttaatgcctctcccacgggcgcacagcacagaggaacgataactccgacatgggttcaaatgatgaccttgagcaagcagcttctccgctctgtgcctcagtttccctcactgtccaaaagggatctgcacaggcaggaccaaaaatattgtgaagataaaatgagttcgtatttgtaacatacttagaatagtgcccggaggtagtaagccggatgtgaagtgctggtgagacaaaatagagctggttgactgcagacctaaaaccgtctcgtctccaagatcttgtctgccattctgggcaagcagatttcgcagcctggggagagggagttgggaaggacttaacttttcaccgcagggcctgagtcctggctttccgcggtggggaaggggtctcccgggtcccctcggtgtggccggccctgcaggccgggaggctggaccggggccgggtgggggctgggcgggggcgcgggcgtccgcagggtccgagcggccggcgcgcgtgtgaaggttaccgcttcccggcggggcgggggccgcgcgctgttgctggggtctgcggggcctgcctgcgcccgcgccccccctccttcccggccagccagtgagcggtacccgccgccgttgccaggggaaactcgccgccccgttacccagcaacaagcctggcccaaccaggcgcgaggaccccccaggccccgcccgccgctgcccaccgcgtgcccaatgccaggcgggcagagccggcccagctcccggagacggcgagcgcgctcattggccaccgccgcgtccgcccggatctgggggagccctcggcgcggggggcggggaaccgggccccggggagctgccgggcgcgcggcctgcaaacctgcgaccggctggggtgatacccgggctgtgcaccatccacctccctgctcccctgtcccgcactctcgggtgaggatgggcagttgggatgggctggaaacggggttgtgcattctgttcctacccccagaatggcaccctggagttggccttgtgccaccaagggtccccctcccacaaggagacctgagcatcctgactccgtgaagacagggactggttgtttcccgctcccccgctccccgccccgcaggtatcgtggctctggaacataacggttgaagttccctcccagaaaacaacccaggcgtcctggccttataaaaatagggtgtcactgcacccccaaaggacccaggcatgcctggccccgtgaaaacaaggagatgagccccctcctcttaggagatgcagatgtcccagccccgggacacaagaactcagggtccccccagaaggggacacagtcatgtctgatcccaggaaaactagggctgaacatcccactcccacaagaaacacggactcaggcctttgggctcccgaccctgagatgttacagagctcctgggcatcttggccctcaccacattgatgctgggagacactcctgtccctaacagtcaccagaccctcaggtgtccagtttacctaggtgggaccacctgcccagctccaaggtgcagacctgcccacttcccacccctctgagcccttttccccagggtccaggtggttgatctcccaggacgtgggcatctgacttcagagccgctttccttacctgttggcaccgaccccccaccttgcgccagggtcccaggcctcatagtgccaaggaccccagaagtccaagccccgtgtctctgattccccagacacctggccaagcgacccagcccctcacagtgatgtggctggggaggagggagtagtggagaggttggggggccctccccagtcccagacccccaggtctggaagatccagccctgcagcacctttacttggccccgtggatccagactgggagcccccagcctcgagagaccgtaacgtgcatggctgggccacttcagagaggcccaattcctcagtcccctccctcccgggagacccaaggcagagccgcctgcagctccagaccccagctccagacttggtgagcccaggtgcggcccgcccctaccctggtacctggcggggcggagttgaggattactcagcctccagaatgaggcgatgacatcatcctggggggggttgactaatggccgcgctggggggggcggggaagtttacccggtaacagcggctgccgcacggccccgcccccggggaagggctgggagggggaggcacagcctgcgctggcgcacacacaaacacacacacacacacacacacacacacacacagcgcatccctcccccaccgtcccacatctaacacagcttcctggggcaagggcaggggtgcgggggttgggtgtttgtgtgactatgtgtgtgtgtgctggagtcctctgtggatttgtgtcagtgtgctgttgtgtcagggggttcacacattacggtggggttgtgtcagtgtgtgctactgtgtgtcacttgatggattgtgtgtcagtgtgatggtgtgtgtcagcatgctacatttgtcacaatgctacatgtcatgggctgctgtgacaatgtgattgtgtgtcagtgtacaattgtgtgatgttctggtgtgctgtgtgtgatcatgatggtgtgatgtgtgtggttctgtgcagcatgctggtctggcagtgagatgtgtgtgcccatgtgattgtgtcctgacgctgggatcgtatatgtgtcagagtgatgttgtgttgggggaagatctgtgaaggtgctatgtcactgtactgttctgttgtcatggttggatgtgtttgtgtaatgctgggtgtcactggggttgtgtgtgtatgtcatggtgatggtgtgtacgtgtatacaatgctgtgtgtatatgggattgtgtgtgtcactgagtgtgtcagtggtacttgtgttgtgggtgttgggactgtgtatgtatcactgtgatagtgtatgcccatgtgctgtgctgggtgtcgggggaagatgtgcatacatactactgttattgtgtgtgcctggacaatgcggtgcacggtgggattgtgtgtgtgtgtgtgacattatgactgtgtctgaaatgcatatctgtgggactgtgtatcaccgacagtatgtgcatgtgcaatgctgtgtgttactgtggttgtgtgtcattgtggttgtgtttgtcagggtgatgttgtgtgtccatggaactgtgtgtctaatagattgcgtgtatgcaatattgtctctcactgtgcttgaatgtgtcactgttgcgattgtatcactgtgatctagtgagtgtgttgggaccaattggttgtgggatgagtgtcactgtattgattgtatgtcactgatactgtgtgtgtcagggtgatgttgtgtgttcaagggactgtgcatacctcatggagattgcatgtgcctgggcagcactgtgtgtgcctgtggttgtgggtctggggagtgctatgtgtcctgggactgtctgtgtcactaagttgtttttttgttttgttttgttttgttttttgagacggagttttgctcttgttgtccaggctggagtgcagtggcagcgaccttggctcattgcaacctccacctcctgggctcaagcgattctcctgcctcagcctcccaagtagctgggactacaggtgcatgccaccacactagagacggagcttcaccacattggttaggctggtcccaaactcccgacctcaagtgatctacccgcctcgacctcccaaaatgctgggattacaggcctgagccaccgtgccaggcctgagccaccgtgcccggctgtcactgatattttgtgtgtctctgtgatgctgtgtgtctgcgtgttcctgggacctgtgtgtctgtcgctgtgtgtgtcattgtgattgtgtatgtgcggtgggcgacgctgcttgtctctgggacggtgtgtgtgtgtgtgtgcgcgccgctgtgattgtatgtcagcgcgcttcgctgggtgtcgggggaaggtgcgcgtgtctccaggcctcctgcccgagaacagcggcgctgctctctgattggccgcggccgcgccagtgagaagctcccgaatcctgcggtaacttggtaacttggagactcggcccgcgccgcagccgcggggctccgggctgggggctgggagggcggggagggggaggggcccgccccgcccctccggggcccgccccgcccctccccgccccgatttcgcaggcccgccccgagcgcccctccccggccccctcgccccgtctccctcacctccagctcggcacctctgaccccctactttgactccatctcccacacccttgcgtcgctcctgactcccctatctctgccactcgctgggtctctctgtctctctctttcccatgtttatctctcctgtctctgtctccctgtagatctctctgcctttgtctctgtctctcatatcccctctctgtttcttccatctgtctctcccatcagtctccaccactgctgtctctccccgtctctgtctccgccacctctgtctctcctagtctctctccgctacctctgtctctgccatctgtctctatcatctctgtctctccctgtctctgtctccatcatctctgtctctcccagtctctgtctccatcatctctgtctctccctgtctctgtctccatcatctctgtctctcccagtctctgtctccatcatctctgtctctcccagtctctgtctccatcatctctgtctctccgtgtctctgtctcccccatctctgtctctgtcgctccatctgactctctcagctgtccctcctggattctgtctctctctctctccctcctctgcctcagtctccccacctttgtctcttcttcctgtcgtctctcccacctcttgtctctgtctctcccgcccccctctcccttccccgatgccctctctcttactcccacagccaggctcagaattcacttttcatccttctaagacagccagcggacggttcgctacttcgtcctcgcccctcccctccggcccaggcttctggcagcaggccccacgcagggcagacttcaggaaggacttcccgccctggttcggcacgagagctttatcgctcgggccaggcggaggccgggcggccccgtggcttccggaggcgcccgggcgggatgagctcactgcgagttggccaggatttcatcagcttcctcctgcggacttgcccccgctcctttcccggcccggccgcgcgggcgaatccgccggacgcctgctgcccccgagcggcagaaggcggaagcacaggcgccgcgcaaaaagcccacctttgcaccagacgatgtcgccagctcaggaagcctgcaaatacaaacccaattcatcctcacaaccaccaggggagatggactatacatatatatattttgaggcggagtctcgctctgtcgcccaggctggagtgcagtggcgcgatctcggctcactgcaacctctgcctcccgggttcaagcgattctccttgcctcagcctcctgagtagctggaactacaagcgcctgccaccatgcccggctaatttttgtatttttagtagaaacagggtttcaccatgttggccaggatggtgtcgatctcttgacctcgtgatccacccgcctcggcctctcaaagtgctgggattacaggcgtgagccaccacgcctggccccatttattcttatatccactcattcagcaattaccacagagtctcccctgtgccaggcactggtgcagttgtaggcatgaggatacagctgtgagcaaaatggatacaaatcctgccttcatgggactgacactctggtctgtggcagaccacacaccaggagaacacagtaacaatacaaagcgaaacttcaagtagaaaaaggaagcagggaagggccgtcaggagtgttgagggatggtgtctttgaaaaagtgctatttgccgccgggcgcggtggctcacatctgtaattccagcactttgggaggccgatgcagaaggatcatttgaggacaggagttcgaggccagcctggccaacatggcgaaaccccatctctaccaaaaatacaaaaattagctgggtgtggtggtgcgtgcctgtaatcccagctacttgggaggctgaggcaggagaatcacttgaacctggaagtgggaggttgcagtgagccgagatcacatcattgcactccagtctgggtgacagagcgagagtctgtcaagaaagcaagcaagcaagaaagcaagaaagcaaggaaggaaggaaggaaggagagagaagaaagaaagagagagcgagcagatgggattggctgaggtactggatgtggatgtgaaggacagagaggcgtttagggggcagccggaaggatgaaggttctgagagaccaattgtcatcatcatcatcatggcagctctctgagttcacctactgtgtgctaggctccgtgccgattcagagctttacatacatgacctggttacatccttatgaccatccatagatccaggaagcagagacgggagctgtggtaggattcaagatttttatacacatatatatatatatatatatatatatataggtttgtttgtttgtttgagatggagtcttgctctgttgcccaggctggagtgcagcggcacgatctcagctcactgcaacctctgcctcctgggttcaagcgattctcctgcctcagcctcctgagtagctgggattacaggcacgtgccaccatgcccggctaatatttgtatttttagtagagacggggtttcaccatgttggacagggtttcaccatgttggtcaggctggtctcaaactcctgacctcataatccacccacctcggcctcccaaagtgctgggattacaggcatgagccaccgcgcctggcccccttttttttttttgagatggagtcttgttgctgtgttgcccagggtggagtgcagtggcatgatctctgctcactgcaagctccacctcttgggttcacgtcgttctcctgcctcaatctcctgagtagctgggactacaggcgcacgccgccaggcctggctaattttttgtatttttagtggagacgggtttcactgagttagccaggatggtctccatctcctgacctcgtgatctacccgcctcggcctcccaaagtgctgggattacaggtatgagccactgtgtccagcctttttctttttttttagacagggtctcactctgtcactcaggctggagtgcagaggtgtgaacatggctcactgcagcctcaaccttccaggcctaagcaatcctcccacctcagcctccctcctgaatagctgggactaccttcttgtgccaccatggccagctaattttatattattttgtagagatgaggtctccccatggtgcccaggctggtctataactcctgggctcaggtgatccttctgcctccgcccccccaaagtgctgggattataggcatgagccactatacatggccttattttttttaagacagtgtcttgctctgttgcccaagcggagcagtggtgtgatcacagctcactgtaatctcaacctcctgggctcaagtgagcctcccacctcagcctcctgagtagctgggaccacaggtgtgtgccaccatgccctgctaattttttctttttaatttcttttatattttattctatttatttttgagacagagtcttgctctgtcgcccaggctggagtgcagtggcacaatctcagctcactgcgacctctgcctcttaggttcaagtgactctcgtgtctcagtctcctgagtagctgggattacaggcccgcaccaccatgcccggctaatttttgtatttttagtagagacagtgtctcaccatgtcactcaggctggcctcgaaccactccaggcctttttaaattttatattttattttgtattttatttattttatttttagagagagggtcttactatgttgcccagatgcccaactcctgggcttaaatgatcctccttcctcagcctcccaagtacctgggaccacaggtgcacaccaccacgcctggctaattttaaatttttttgtagagatggggggggggaggtctcattatgttacccaggctggtctcgaattcctggcctcaagcgatcctctggccttagcctcccgaagtgctgggactacaggcctgaaccaccgcgcctggcctctacctattcctttgtttagctgtttgttgtctgtcttctggagaaagtgagctccatggcggcagggacattctaattcccatttcacagatcgggaaactagaaggaggcccggcacaaagtaggttctcatgggttcaggtttgttgaatgaatatgcgtgtctgtttgtctcaagcggcagggagtgcgccgcaccgccccctggtggagagtgggaaacgtgtccgccggcgtgattatcaaatttcctgggagatcttcaagtccgcccttagccactgcgtactaacggtagaatttaactccattccacaaataaacacaaagtattttttatgattatttttgaacttgtaaaatttgttttttgatttcttgagaccattgtttaagctgtagcataagttacacacttctctaaagcctcccaattctttttttttttaggaacaaggtctccctcgccgctcaggctggaatgcagtggcacgatcagagctcattgcagccttgaagtcctgaagctccagactcttttttttgttttttgaaacgcagtctcgctttgtcgcccaggctggagtacagtggtgtgatctcggctcactgcaacctctgcctcccaagttcaagcaattctctaattctctgcctcagcctcctgagtagctgggatgacaggcgcccgccaccatgcccggctaatttttttgtatttttactacagacgggtttcaccatcttggccagggtggtcttgaaatcctgacctcgtgatccacctgctttggcctctcaacgtgctgcgattacaggcataagccaccgcacctggccctctttttttttttttttgagacagagtctggctctgtcccccaggctggagtgtgatctcggctccctgcaactctgcctccctgttccagtgattctcttgcctcagcccccggagtagctgggattacaggcgcacgccaccacgcccggctaatttttgtatttttagtagagacagggtttcatcatgttggccaggctggtctagaactcctgacttcaggcgacccacacccgcctcggcctcccaaagtgctgggattacaggtgtgagccaccacacctggccttttttttttttttaaagagtctcgttgtgtcgcccagtctggagtgcagtggtgtgatctcggctcactgcaacctccaactcctgggttcaagcgattcttctgcctcagcctcccacatagctgggactacaggcgttcgccaccacgcccggctaatttttttttttttgtatttttactagagatggggttccactgtgttagccaggatggtctcgatctcctgacctcatgatccgcccgcctcaacctcccaaagttctgggattacaggcgtgagccaccgcgcccagccttttttttttttttttttttaatgtatttgcttgtcgttaatgggatagtaataaggttgaggtttttgttaaggggagtttacttatcattaaactctgtagttactactacaaggaaactcttcccaagtacattaaacactaggttttataatatttgccacactgccaataaattctgttcacatattaagtatgacaagtccactatatgtaacatgtaagaatgctatactaggccgggcacagtggctcacacctgtaatcccagcactttgggaggctgaggcgggcagatcacgaggtcaggagatcgagaccatcctggctaacacgttgaaaccccgtctctgctaaaaatacaaaaaattagccgggtgtggcggcgtgcgcctgtagtcccagctgctggggaagctgaggtaggagaacggcgtgaacccgggaggcagagcttgcagtgagccgagatcgcgccactgcactccagcctgggtgacagagcgagactctgtctcaaaaaaaaaaaaaaaaaaaaaagaatgctatactggcagtagacctagggccagaataaattggcaagttttcattccatataaatgtgggaaaaaagtgagtacaacttttttttttttttttttttgagacagagtttcactcttgttgcccaggctggagtgcaatggtacgatctcggctcaccgcaacctctgcctcccgggttcaagcaattctcctgcctcagcctcccgagtagctgggattacaggcatgtgccaccacacccagctaatttttgtatttttagtagagacagcgtttcaccatgttggtcaggctggtctcgaactcctgacctcgtgatctgcccgcctcggcctcccaaagtgctgggattacaggcatgagccaccatgcccagccttttttttttttttttttttttgtgagaggaagtcttgctctgttgcccaggctggagtgcagtggcacgattttggctcactgcaacctctgcctcctgggttcaagcaattctcctgcctcagcctcctgggtagctgggactacaggtgtccaccactacacccggctaatttgtttgtatttgtagtagagacggggttttaccatgttggcgaggctggtcttgaactcctgacctcatgtggtctgcccaccttggcctcccaaagtgttgggattacaggcgtaagccaccgtgcccggccacatgaaatgtttaatgtggttgatctcagcttcattcacactgacttcagggagtctggttttctatgctcaagattgttctattgctgatttgccgttgttttgttttctttcaggatcaaggtgggtacttttttttttctttgagatggagtctcgctttgtcgcccaggctggagtgcggtggcgccatctcggctcactgcaagctccacctcctgggttcacaccattctcctgcctcagcctcccgagtagctgggaccacaggcgcatgccaccacgcccggctaattttttgtattttttttagtagagatggggtttcaccatgttaaccaggatggtttcgatctcctgacctcgtgatccatccagctccgcctcccaaagtactgggattacaggcctgagccaccgcgcccagcttttttttttttttttttttaatagagatggggatgggaggggtctcactactatgcccaggctggtgacaaacttctgggctcaagtgatctaccctccttggcctcccaaagtgctgggattacaggagtcagccaccgcacctggcccctcccaaactcttaagtgcagaactccatgtaaccagcacctaggtggagaaacagaacgttcttagccccatttcctgaccctgattaccctaattaccctcagggtaatcattatcgtgaattctaacaccagagattagttttgcttgttttagaatttcatataaatggaccatgaaatatgttctctttggtgtctgtatgcctttgttatgcagcctaatgtttgcaagattcatgcatgttcttgtttacttttccttttttttcctttctttctttcttcccccgcctcccccgcctccccacagagcctggctctgttgcccaggcttgagactcagcctcccaagtagctgggattacaggcccagtgccaccacgcccggctaatttttgtatttttagtagagacggggtttcaccatgttggccaggctggtctcgatctccctatctcaggtgatccacctgcctcggccgcccaaagtgctgggattacaggtgcgagccactgtgcccagccttgacttccttccttccttcctttcgagacaggggtctcactttgttgtcgctcagtctggcgttgaactcctggcctctagtgatcctcccaccttggcctccccagtgctggtgcaccactgcaccctgctgattgatcactttcagtgttgcagagtctttcactgtgtaaagacaggatcataactcactgcaatctcgacctcctgggctcaagcaatccttctgcctcagcctcctgagtagctaggaccatgtgccaccatgcctggctaattttattttattttattattattactttttaaaatatgctgactttagttatttacttttttttttttttaagatggagtctcactctgccgccaggctggagtgcagtggtgtgatctcggctcactgcaacctctgcctcccaggttcaagcgattctcctgcctcagcctcctgagtaagctgggatcacaggcgtgcaccaccacgcccggctaatttttttttgttttttgttttttgtttttgagacagtctcactctgtcgtcgaggctggagtgcagtagcactgtgttggctcactgcaacctccgtctcctgggttcaagcaattctcctgcctcagcctcccaagcagctgggactacaggcgtccaccatgacgcccggatagatttttcttttttttttttttcttgagacggagtctggctctgttgcccaggctggagtgcagtggcgtgatttcagctcactgcaagctccacctcctgggttcacgccattttcctgcctcagcctccctggtagctgggactacaggtgcccgccaccatgcccggctaattttttttacatttttagcagagatggggtttcaccatgttggccaggctggtcatgaactcctgacctcaggtgatccacccacctcagcctcccaaagtgccgtgattacaggtgtgagccaccgtgcctggccacgcctggctaattttgtgtgtgtgtgtgtgtacttatttttttgagacagtgtgtcgctctgtcacccaggctaaagtgcagtggcgggatctcagctcactgcaacctctgcctcccaaattcaagcaattcttctgcctcagcctcctgagtagctgggactacaggcgtgcactgacactcttggataatttttttttttttgaggtggagtcttgctctgtccctcaggctggattgcaatgacgcgatctcggctcactgaagcctccgcctcccgggtttaaacgactctcctgcttcagcctcccaagtagctgggattacaggtgcacaccaccacacctggctaatttctttttgcatgtgtgtagttttagtagagacgggatttcaccatgttggccaggctggtctcgaactcctgacctcagatgatcctcctgccttggcctcccaaagtcctgggattacagacatgagccaccacgcccagccgaggctgagtctttatcttggggactggcctgggcattggaaggtgttcaggagcagccctggcctctgtccactagatgtcaagaggaccctctcttgtgacaaccagaaatgtccctagtcattgagaaatgtcctttagggggcaaaattacctccattgagaaccactggataagaacacggagtttgaggatgcacaaaagggagtgatgtggctggagagggcagcagcggtgacacacacaccactcaggctccatcaagtcagctctccccagggtgctctgggcagcctctttctgtcagaacagttgccatagtttgaatgtgtccgtcgaagttcatgtgttgaaaacagtcggcagggcgcggtagctcacgcctgtaatcccagcactttggaaggccgaggcaggtggatcacgaggtcaggagttcaagaccagcctggtcaaaacggtgaaaccctgtctctactaaaaatacaaaaaaaagtagccagacatggtggcagatgcctgtaatcccagctactcaggaggctgaggcagcgaattgcttcaacctgggaggcggaggttgcagtgaggcgagattgcgccatcgcactccagcctgggcaaaaagagcaaaacctgtcttagaaaaacaaacaaacaaacaaaatatatatatatatttatacaaacacatacacacacatatatggagagagagagaggtgggggtcccactatgttggccaggctgaccttgagtgagctcctggccttaaatgatcctcccacctctgcctcccaaagtgttggaattacaggcatgagccactgtatttggcctaatttttaattttttttgtggagactaggtctcactctattgcccagactggtttcaaattcccgagctgaagtgatctgcccaccttggcctcccaaagttctgggattacaggcatgagtcaccgcactggcctcaagtgaatttcgttacatgcatagattgctatttggacaattataagaggattaagtttcattggtatctctgaaaggctgtgaacagtagccttagaaatggtaaggaattaccaggtacttccactttctatgtcttaaatcacaaaataaaatgactggcactacaggcaatctggtctgtccacttataactgtcattcaccttaactgagggtattctgtagcattcatcatcatttgtcacaatacctttattatttatttatttattctgagacagagtttcactcttgttgcccaggctggagtgcagtggctcaatcttggctcactgcaacctccatttcccaggttcaagtgattctcctgcctcagcctccccagtagcaggggttacaggcgtgagccacagcgcctggtcggcttgtcacactagctttattatgtctaagttttggttaatgctgtaacctcctggactctgcagctattcagctgctgttgctttgagtatcttctagttttgggaatgcaccaagctcattcaccacagggcctttgcataggttgtgtccttggcctgcacaggcagcctctcaccctccggcctctcctgcccctcttgccaggcatctcccacaggtgctgctatttcccatttacttgtgtcttcccttaggaggacaaggatggggtcagctttgttcatcatctcagttcccccaccaacttttcctcccagcacgcagcctggcagtcaatgctgatttgggagaatgaacgactgattctatcggttgaacgtttattttatatatatatatatatatatatatatatatatatatatatatatatactttttttttttttttttttttgagacggagtctcgctctgtcgcccaggctggagtgcagtggcgtgatctcggctcactgcaagctccgcctcccgggttcacgccattctcctgcctcagcctcccaagtagctgggactacaggcgcccgccactacgcccggctaattttttgtatttttagtagagacggggtttcaccgttttagccgggatggtctcgatctcctgacctcgtgatccgcccgcctcggcctcccaaagtgctgggattacaggcgtgagccaccgcgcccggccttattttatattttatgatttcatttacttatttattttcgatacggagtctcactttgtcgcccaggctggagtgcagtggcacgatcttgcctcactgcaacctctgcctcccgggttcaagcaattctctatctcagcctcccaagtagctgggattacaggcatctgccaccatgcttggctaaattttgtatttttagtaaagacggggtttcaccatgttagccaggctggtctcgaactcctgaccttgtgatccacctgcctcggcctcccaaagtgctgggattacaggcatgagccactgcgcctggccagttatttatttttttgagacgtagtcttgctctgtcgcccaggctggagtgcaatggcacgatctcagctcactgcaacctctgcctcccgggtttaagcgattctcctgcttcagcctgtagctgggattacaggtgttacaggtgcccgccaccatgcctggctaatttttgtattttttagtagagacagggtttcaccacgttggtcaggctggtctcaaactcctgacctcgggtgatccacccgcctcggactcccaaagtgctgggattacaggcgtgagccacggcgcccggcctattttattttgagacggagtctctcgttctgtcgcccaggctgcagtgcagtggtgcaatctcggcttactgcaacctctgcctcccgggttcaagcgatgctcctgcctcagcctcccaagtagctgggattacaggcgcccgccaccatgcctggctaatttttgtatatgtatattttttgagacggagtctccctgtgtcgcccaggctagagtgcagtggagcgatctcggctcactgcaagctccgcccccggggttcacgccattctcctggctcagtctccggagtagctcggactacaggcgcccgccaccacgccgggctgattttttttgtatttttagtagagacggggtttcaccatgttggcaaggatggtctcgaattcctggcctcaagtgatccgccctcctcggcctcccaaagtgctgggattacaagcgtgagccactgcgcccagcattttattttattttcgagaaggggtctgctctgtcgtctaggctgcagtgcggtggcatgatctcggctcactgcaacctctgcctccccggttcaagcgattctcctgcttcagcctcccgagttgctgggattacaggcgcgcgccaccacaaccggctaattttttttgtagagacgggatttcacaatgttggccagactgatctcgaacttctgacctcaggtgatccgcccgcctcggcctcccaaggtgctgggattacaagtgtgagccaccgcccacggccggtagaacatctgaagcttctaaagcgaactctaaggtttcattggcacgagggggctcgaaccacgccaggcttccaggcgtcagtgcccagtgcttggcatctactgatagaaaccaggaatgaggggctggaggcggaaacagcttgaagaaagaggtagaggccagggagtgaggacggtgtctccttttcctggaagttggtaattcaggcagaaggaagttggatgagcttgcggaacacccggggggccagtcggccccgctcccgcatccatcgcggaggcgcggcccctttaaggctcccggaaacggtcccacaggaccggaagtgaccctctttatttcccttcctcacgtggtgcaggcaggaagtgacgcgcctggcccgggagctgcggtcgcagaggccgacggagccggagtcgcggacgccgcggggtctccgggacaggtgacctgggggagggggccgggagcgcgcccagagaaggcggggcctgaagccccacgtggcggggagtgcgaacaggcccgggcggggtcggagttctctgcggggggcggggacaggacgcccacatgggaagctggaggggcgctggcggggcgggccgttgggtgggtgggcagggtcggggcggggcgtggccagagcctgggccggcggctgtgggcgggacctaaaagttgtggctggactgtgggcggggccatagtgttgcttgttcagctgtgtggcggggctcggacgccgggcggaagctctgtgggcggggccagaaagttttgccttactggaagtgggtccagattcttggccgggacgttgggggcggacccagaggctgacgcaatggcgggggcggggccacaatgtagtgggggagccagggggcggggccagggtgctggcggggaatgctgggggtggagccagaaagtttcgtctgagccacgggcgcggccagagcgttggccgggaggcggggaagcggggagttgagccagaaccctggggaagccatgggcggggccagatgctgacgcaacgaggtgtgggagggagtcagggggcgtgtccaggaggttggccaggccaatcggaggcggggccagagggttgactgggcaggccgggggcggggctggaataataataagagatggtaggggcgggtgtaggctgttgcctgcgagccaggaggcggggaaagagcgtggctgggaaagtcgggagcggggccacattaatggcccatgggtgggggcggggccagaagtctggcgggaaaggcggggccagaaagttttttcccgagccgtgggcggggccagagcggtttccaggatgtcggggacgtggccctggcattcccagccggattgaggctggagctttgcacagaaaatctggggcgggcctgggtagttttgtccttgttggggcgggtggagtattcagtggggcaaaacgccagttccaggaagcctcgccagtgagttctgggcctgtgtacagaatcctttcgggggaggcgggaggctgtcgaccttccgtagggcgctggagacgggactaggacgtccctgaggaaggcgcgggcttggaatgttctctgagagcttgggcagccaataagagtggggttcggactttctttgagcgtgggattgggaatgtttctgaaccttacctggtggagctagaatattcgcctggatatgagaggcaccaggatgagcacagggaggtgggtctggaactttcttttgcaggctggttggaggggttgtagttggaactctcttgagatagggaacccgggctaacactcataccacagggtgtggcggctggcctagaatcagcctttggaggagagcagtgttggatacttaagcagtgggtgggggccagaacatccccaaggtgggtttgactagatcgtttacatgggaactgggtgagtccacaaagatcatgaaagggctgagtctgaatttctatggagaagatggaggtggcagttgaaaggagggagagtgagggctacaattctcttggggtacagggttttttgtgtatggctgtgaggatcccgcagtatgttagagggtgaagtaggttggggggccattggcctttgtcctttttttccctctgtccccaggaaccctcagtgctgcgtctagattctgcaggggaggtttgctgggaccttggctccacgcagccagcgaaatggtgaggctgaaaaatggggtctctagaatctgagttttggggaagggggcttgggaggatgggatccataggggcagactctcagaccctgggggaaagtccctggtatggatggaggtttttccttccatccctcaactgcctcccggtctcaggcagccacactcgatttgaaatcaaaggaggagaaggatgctgagttggacaagaggatcgaggctcttcggcggaagaatgaggccctcatccggcgctaccaggtgccctagccccgccctgggagaccccatcccctctcttccccgcagtgagtttttctcacctctcccttccttaaaaccttttcatggctccccatcactgtcaggataaaggccaaaggccttagcctgacatcccttctttcattccattattcattcattcattcatttgttcacaaatattccccaagatctttaccagccccagtgctgagtggtgctggggatatagctgtgactgagacagacccaggcctgccccctccagggtccaccgtctagtcagggagacagccctgtcctcagggatgccccagagcagacaagtctggaatcaggaaattcaggggtctgtgggagtccagaggaggctcttgacccagccttggggatatcagggagggcttcctggaggagtggactctgaggcttgagtggtgagtagacaatagccagttgaaaaggcgaggggaacatgtttcaggcagaaagaacagtttgtgcaaatgttggaagcaagagagagcttggagcttcaagttggagggttggttaggagagaattgacctgggcaggtcagcaggggccaggctgtgctaggccctgaatgccaccaggatgagtttggactttgtcctgagggcactggggagccagggagagccttgagcaggggtgggaccggtcagaacagctctttaggaagacgcctctgggtgctgtgcggtggtgggtgcgaggaggtgatactggagcccagagaccaaggaggaagctggggctggaaccctagtgggagaggaggtacctggctcagggcagggctgttgagagggactcagttactgatgggcagttcagggcagggggaggaagagggaggatttaggacaaggctgctgagtaggtgatgtggctctccctgagatgggatctgggaggtggcatgggtttcatttattcattcttcatgtattcattcattttaaaaaaggcatattgaatttcccttgtgggccaggcagcgttctagacttgggatacacgtcagtgacatacatcactgaaagcagacagacattcctgtccccaggcagattctgccgtagtggaggaagcagacagtgagcgagacgcatatggtgctgggtgcaaatgggatgagaacagagagggtggcaggggagctggtttccacagggtgctcagggaaggcctcacgagaaggcagcattggagcagagacctacaggaggtgaggggttggagggtctctgggaaaagtgttcctggcagagggatccgctggcgcaaagcccctgaggcaggtttcagcctggtatgttgtgggaatagcaaggaagccggagtgatcgtggggagagggtgagagatgaggtcggggaggtaccaaggccagaccccacgggtcccacaggctgtggggaaggctgttactcagaggggcaccacaggaacgttctgagtggggctgcaacgtgctgaggtttgagggatatgagcggccttcttgttcagagtccaggagagaggcctgggctggggccagacttaggaggagttcaggggtctgggagtccgtctggcagacagggcacctgatgcttccctaccccggctgtctgctcctaggagattgaggaagaccgtaagaaagctgaacttgagggagtcgcagtcacagctccccgaaagggccgctcagtggagaaggagaacgtggcagtggagtcggtgagctcgtcactggggtgtgggaccctgaggatggggaggggcagagggttgaggcctgggacccaggagcccccagctgtcctgcaccagtgggtggcctccatcctggccgcatgcctccctgccccagtgactgtattttccccatctcccctcttccaggagaagaacctgggtccttcccggaggtctcctgggacccctcggcccccaggggccagcaaggggggccggactcctccacagcagggaggccgggccggcatgggccgagcatcgcgcagctgggagggcagccccggggagcagcctcgaggaggaggagctgggggccgtggccggaggggccggggccgaggttcacctcacctctctggagctggagacacctcaatctctgaccgtaaatccaaggtaggagctaggcagcgcctggagccctggctgaggttctctgttgtctgtttctgttttttcctcctctcagatgcacatttgtcctgtgtgtccatctttcagtatctctctctgagcctttgcatctggctctgtttctctcttcctccacctccttctcctcctcctgctccccctcttctagttccccctgttccttccctctcacgcctagagctcgtgtgtttttccttgtctctttctctcctactcctgctccccgtcttcttgttcctcctcgccttccttccctcccctctcctgcttagtgctgcgtgtccctccctgtccctctctgtctccctttttctcgctctctggtgcatgcttgcccactcatcctccgtccccatctctcctccctttctggcactgtgtgtctgtctggtgggctctctctatctggtgtgcttgtgagcacaggctctgtgtggcattctgtttctgtgtgtttctcttggtccccggctttggttatggggagcagtgattttactgtaactacctcactcacccctgacgtgcaggtcagcagggtgggagtctgtctagctgagtggcttacagcccaccgtggacatgggttgaatctggttctgtgagctacctggccttgggcagctcacttcccctgtgagcttctggttctagcacttacacgggaataagaaaattcaaaaattagctggacgtggtggtgggcacctgtaatcccagctacttgggaggctgaggcaggaggatcacttaaacctgggaggtggaggtcacagtgagccgagatcatgccactgcactccagcctgggcgacagaatgagactctgtatcaaaaaaaaaaaaaaaaaaaaaaaatgctgggcgtggtggctcacgaggcctgtaatcccagcactttgggaggctgaggtgggcggatcacctgaagtcaggagttcgagaccagcctggccaacatggcgaaaccccatctctactaaaagtacaaaaattagccgggtgtggtggcacacgcctgtaatcccagctactcgggaggctgaggcagaagaattgcttgaacctgggaggtggaggttgcagtgagccgagattgcgccattgtactccagcctggacaacaagagtgaaactccgtctcaaaaaaaaaaaaataattagacttaaattgggcatgccaagctgctgtcacacaaagactccaaaaatttcatgacctaagtggagtaggagtttatttctcccttgtatgctgagccctgcagggaggtgggtggtccagggggtgaggccctgctccatgatgtcactcagggacccaggttcctgctttttttttttttttttttttcttgagacagagtctcactttgttgcccaggctagagtgcagtggcatgatcttggctcactgcaacctccgcctcctgggttcaagcaattcttgtgcttcagcctcccaagtagctgggattacaggtgtgcaccaccacacccggctagtttttgtgttttcagtagagatggggtttcgccatgttggccaggctggccttgaactcctgacctcaggtgatcctaccgcctcggcctcccaaaatgctgcgatgacatgtgtgagctgctgcgcccggcctggttcctgtttttgttgcttggtggcccctaggtcctggtcattgtctgtggtaacagctgggttgccgacatggttgcggttcagttcacaggaaggggaaagataagtctgctttatcacttttggtcatgtcctgttggtgagaacttagacacctggtcatacctaacctcaaaggagactgggaaatgaaaacgttgtctacagctggctggctatttgcccatctaaaattttgtcactagcttggttactagtaacaagtagttactagctacttggaatgctgggtgctgtggtatgggcttgtggtcctagctacttgggaagctaaggtgggaggatcgcttgagcccaggagtttgagaccaggctgggcaacagagtgagaccccatctctataaaaattttaaaaattaactggacgtggtggtgtgcccctgtggtcccagctacttacttgggaggctgagccagcaggatcacttgggaggctgagcctgggaggtcaaggatgcagtgagctgtgaacacacaccactacattccagcctgggcaacagagtaagaccctgtctcaaaaaaaaaaaaaatcaataaatttttgctaccatggaaggaagaaggggagaacggattgtggttggtgggggtaggtcacctaaccatctgccaagtaattactgttattaccaccactatgattgcggcaaccttggtgtgccagggcccccagcaccctgacactgaactcgcaggttcagtggtttgctagaaagactcatggcttagatttatcacagtgaaagagatcacaaagcaaaatcagcagggggcggggtacctgggctgaggtctggaggaaacccggcatgaacttccaagagtcctttccctgtggagtcccaggggatgcgctgaattcctccagcactgaattgtgacaacatgtggcttaccagggatgcccacgagagattcagcactccaggtttttaattgggggctggtttatttttatttattgtatttatttagtttttaaaatttctttttgtttttgagatggagtttcactcttgttgcccaggctggagtgcagtggtatgatttcggctcactgcaacctccgccttttggtttcaagcaattctcctgtctcagcctcccaagtagctgggattacaggtgcccaccaccatgcccggctaacttttgtatttttagtagagacggggtttcaccatgttggccaggctggtctcgaactcctgacctcgtgatccacctgcctcggccttccaaagtgctgggaatacaggcgtgagccactgtgcccgacccgttatttttatttttattttattttattttttgagacagagtcctactctgttgcccaggctggagtgcagtggcacaatctcggctcactgcaacgtccacctcctgggttcaagtgattctcttgcctcagcctcccgagcagctgggattacaggcgcccaccaccatgcttggctaatttttttcgtatttttagtgagatggggtttccccatgttagccagcctggtctcaaactcctgacctcaggtgatccacccacttcggcctcccaaagtgctgggattacaggcgtgagccaccgcgcccggccacttttaaaattttttgtagagacagggtcttgctatgttgcctagtctggccttgaactcctgggctgaagcaatcctcctgccttggcctcccaaagtgcttggattagaggtgtgagccaccatgtcagcctggaggctagttttgaacgcaggccccttctgtctagtatgtactgaaattccagaccccccagtaggaaggcgaatgcagcgtacagcgtgttgttcgcatagtccaagcctggccagccagcctcatcagttcactgctgacctggagcacgctgagagcaaatggtcagatgccagcaggccagtccgaggagaggagcctcaggcctgctgggcagcccgtctcctgcaccggcagcttaatagttctccctgaagctgggtgtccctatctttatccccccaggagtgggaggagcggcgcaggcagaacattgagaagatgaatgaggagatggagaagatcgccgagtatgagcgcaaccagcgggtcagtggtgcgggtgtccccgaggcagggccgagctgcctgggctgcggggagcccgcgccaaccccctgctctgctgcctgcaggaaggggttcttgaacccaacccagtgcggaacttcctggacgacccccggcgacgcagcgggcccctggaggagtctgagcgggaccgccgggaggagagccgccggcacggccgcaactgggggggccccgacttcgagcgggtgcgctgtggccttgagcacgagcggcaggtgggtgttggcagtgaggacacctcggggctctcagggctttgatggggactgcatagcaggaaccagacagatcagggccatggggcctctccttttttgtgccacagcacaggactttttttttttgagacggattctcgctctgtcacccattctggagtgcagtggcaccatctcggctcactgcagcctttgcctcctgggctcaagcaattctgcctcagcctcccgagtagctgggattacaggcaagtgccaccacacctggctaattttttcgtattttgtagagacggggtttcaccatgttggccaggctagtcttgaactcctgacctcaagtgatccacctgcctcggcctcccaaaatgctgggattataggtgtgagccactgtgcttgcccaggattttaattattaaggatttatggtatgttttgtttcctgccaaggtaaatctcccctcattgttaatgacaccagcatttatgaggcacctaccacatggcaggtgctgtgtgaggggtggggacctggcctagaagaggaggcaggggcagtgtccttgcacttggtggtccacccctaaattgtccgtctgttggttcttctgtcagtaccacgtggctctagttgttacagctttgtggtatgtttgagggttttcttgttactaacagtattgtttactgggcacttactatgtgccaggtactgttttaggtgctgaggataagaggtttttttttttttttgagatggagtcttgctccatcgcccaggctggagtgcagtggcgtgatcttggctcactgcaagctccgactcccgggttcacaccattctcctgcctcagcctccccagtagctgggactaaggtgcccaccaccatgcccagctaattttttgtacttttagtagagatggggtttcaccatgttagccaggatggtctctatctcctgacctcgtgatctgcccgcctcagcctcccaaagtgctgagattacaggcgtgagccaccgctcctggctttttttttttttttttttttttttttttgagacagagtcttgccctgttgcctaggctggagtgcagtggcgcgatctcggctcactgcaagctctgcctcctgggttcatgccagtctcctgcctcagcctcccgaaaagctgggactacaggcacccgctaccacgcccagctaattttttgtatttttagtagagacagggtttcaccatattagccaggatggtctccatctcctgacctcatgatccgcctaccttggcctcccaaagtgctgggattacaggcgtgagccaccgcgcccggcgggagaagagtttggaggcagagcccctgccttgatgaggtttcttctggtgggagctgagtaaatgaaaatatagtgagatgtgaggtcctaccaagtgttgtggagaaaaatccagcagctgaggggacagagggatgctacttaggagatctgagagggcctctgtgaggaggtgccacctgagcctagttgattgtgatctctgccttgtcatcgcttccctgtgtgatcctgagcaagtggatgtgcctcggggcttaggggcggggtagggtgcgggacatcaccctgactccctgtgggctggggggcagggccgccgagctggcctgggcagtgctggagacatgacgttgtccatgacgggccgggagcggtcggagtacctgcgctggaagcaggagagggagaagatcgaccaggagcggctgcagaggcaccgcaagcccactggccagtggaggcgcgagtgggatgccgagaagaccgatgggatgtgagtctcctccccgctcctctccccatgtggcacgttgaccttggccctgacttctaagtcctatgcctctctctggtttttcctgctgtgtatgagtgagtgactgccaagtatcctgagatgccatggaccagctgctggagctcagcggcacgtgagagcatttctggttttcttttttttttttgagacggagtctcgctctgtcgcccaggctggagtgcagtggcgtgatctcggctcaccgcaagctccgcctcccaggttcacaccactctcctgcctcagcctcccgaatagctgggactacaggcgtccgccaccacgtccaactaattttttgtatttttagtagagacagggtttcaccgtgttagccaggatggtctcaatctcctgtccttgtgatctgcctgccttggcctcccaaagtgctgagattacaggcgtgagccaccgcgcgcggccgagcatttctggttttctttttgtttttggagacagagtctagctctgtcgcccaggctggatggagtgcagtgggaggatctcagctcactgcaacctccgcctcccgtgttcaagcaattctcctgcctccgcctcctgagcagctggggtgagaggatttcttctgtgttcatgggtatgctgggctgagctgatccaggctggacgctaagctgtgggtcccgctgggcttggcttcttgcagcagggtgaattcactctgcgccagggtgttcattctgctgtccaggctgagggcagcagctgcctggggagcgcttgccctgacatgggcagatgcacaagcaggcacacttcccagttgtgttcgccagcacaccccgcctcactggggcggggaaataagctctgccccctccagtggataggaacaccggtggcggcagggacatcagttccaacgcagggagggcatgaaggctgtttaacagcgattagacctttgcatcctcctgccagcctctgacctgtccccagcaactcagatccctgaatgtctccatgcctcaccgtcacctttttttttttactttttttttgagacggagtctcgcactgttgccggggctggagtgcagtgatgtgatctcggctcactgcaacctccgcctcctgggttcaagcgattttcctgcctcagcctcctgagtagctgggattacaggcacgtgccaccacatccagctaattttttgtaattttagtagaggtggggtttcaccatgttggcctggctggtcttgaactcctgacctcatgattcacccacctcagcctcccaaagtgctgagattacaggtgtgagccaccgcgcccggcaccaccaccttcttaacccagtggcattgttaacctcaagtttgactttgtcccccgattcagtcagacttaaagcaaagccctcattgcatcatcgtcatggggaccaacttccataaccaagaaggagaaggttctggaagagccgataaatagcagtatttaaagatcagcaactttaggttttacctcatcccccattctttcctgtgttgaaagttttcattcacctataacttgttttttggctttggctaaggaggattttgtctgtttgcccagtggtcgggaagcattttgttgtggattgtgaaccaagcctgtgcgagtgtgagaaataatttgcacagatactatagctgatcttcctaaggaggaggcagctgggcttttggggagatgttctcagcattcacaatgagaaagtatttgtttttcttatgtgtcctaaaagcagtttgcaacaagtctgatgaataatgtttgtgtgggccgggtgcagtggctcacgtctgtaatcccagcactttgggaggctgaggcaggtggatcacgaggtcaggagatcaaaaccatcctggctaacacggtgaaaccccgtctctactaaaaatacaaaaaattagccgggtgtggtggtgggcgccctgtagtcccagctactcgggaggctgaggcaggagaatggtgtgaacctgggaggtggagcttgcagtgagccgagatctcaccactgcattccagcctgggcgacagagagagactccgtttcaaaaaataataataataataataataatgtgtgtctgggccaggcgtggtggctcatgcttgtaatccccacaatcccagcactttaggaggccaaggctggaggactgcttgaacccaggaggtttgcagtgagctgttatgatgccactgcactccagcctggaccacagagcaagaccctatctctaagaaaaaaaaatgcatggtgtcttgctttcatcagcatatatttgagtcctcctctatgtcatggaaggttctaggtgatacagcagcaaacaaaacatttctgcctttttggaactaagagtgtagtgggcaaggtgggtaattaagaggtctaatgttaggcccagaaggataatgatgcagagtaagcagccagggtggaggttagaattttagacttagataatctgtgtaataatattatctttttttttttgtttttttgagactgagtcttgctgtgttgcccaggctagagtgcagtggtgtgatttcagctcactgcaacatcgcctcctgggttcaaataattctgattcagcctcccgagtagctgagattacaggtgccagccaccaagcccggctaatttttgtatttttagtagagatggggtttcaccctggtctcgaactcctggcctcaggtgatccgcccacctggactcccaaagtgttgggattacaggcgtgagccaccgtgcccggccctaatattatcttagctgggggttcaggaaggcctcttagcagagccctgaaaggaggtgagggagtgagccagtgaaaaacgtgggaagaacgttccaggagcaggcgctaaggccctgaggcaggagctaggtgtggtggaagagcctgcttagctggagaggtgagggagactggtgggaaaggtcagatagggagttgtgggtcatgtacttgggcaagggtctgtggtgatccccccaaatttttgttttggcgcccacattctgaatctttttgtatttgtcactatgctgtcaaatttgcctcttgcccatcacctggtcctatcctttgttttttttttttgagatagggtctccctctgtcacccaggctcgagtacagtggcttgattactgctcactgcagccttgacctcccaggctcaagtgatcctccctcctcagcctcccgagtagctgagattacaggcacgtgccaccacgcccagctaatttttgtattttttgtagaggtggggcttcaccatgttcaccacgctggtcttgaactcctgggctcaagcgatctgtctgcctcggcctcccagagtgcggggattacaggcttgagccaccatgcccggccctgtcctacttctagtgtcccctgtctggttgaccgtctgtctctgatccgattcctgaccctgacctctcccatcttcttgatcctcttgttaccctgttcccccagctgcccgctcacccgttatctttcccccaggttcaaggatggcccagtccctgcccatgaaccatcccaccgctatggtgagtgggtgcccttggatgagctgaggctcggtctgggagtcaggggtggtgtgtgccacaccttcccttcccaatgacacctgggttctgttgcagatgaccaggcctgggcccggcccccgaagccccctacttttggggagttcctgtcccagcacaaagctgaggccagcagccgcagaaggagaaagagcagtcggccccaggccaaggcagcgcccagggcctacaggtggggcaccccttctgcgggcttgcatacccccagggctctccgcagggcgttctcttctttggcttgctgtgaaggtgtgggtacatctgtctgtccctgtctttgtcttggccctgtctatctcgcaggtccgtggtttgaggggcttgggatctggctcttggttttaccctcatctgtcccctttctgccgtcacccatctcctctcctgctacctgccccactttcgttctgtccttgacacatggggacacacatccgccattccctcagccctccaccatgccagatgctctgggcagctcctccctagggagggtggaggcaggaagccccttcctcctgtctactctccacccaggcatcacccctccctctgttccctctagtgaccatgatgaccgctgggagacaaaagaaggggcagcatccccagcccctgagactccacagcctacttcccccgagacttcccccaaggagacacccatgcaggtgaggctgggctgtggttcagggcacgggcctggggtgggggctcaggacctgtgccttgccctgacttgcctgtgtccccaaagccacccgagatcccagctcctgcccaccggcctcctgaagacgagggggaagagaatgagggggaagaggatgaagaatgggaggacataagtgaggatgaggaagaggaggagatcgaggtggaagaaggtgatgaggaggaaccagcccaagaccaccaagccccagaggctgcccccaccgggatcccctgcagtgagcaggcccacggagtccccttcagtccggaggagcccctgctggagccccaggcccctggcacgccttccagccctttctcaccacccagcggccaccagcctgtgtccgattggggtgaagaggtggagctgaattctccccggaccactcacctggctggcgccctctccccgggtgaggcctggccttttgagagtgtatgaagctggctgcctgtgtgtgtgtgtgtgtgtgtgtgtgtgtgtgtgtgtgtgtgtgcgcgcgcgcgcgcgcgcgcgcgcgcgctagaggggtgtggctggtgggggacccttggggctgggccctgggacccagtgtgccccacagccctgtcagctgagggggtagcgcagcccatgctcttctgtactgtcatgcccgtctctggaatgtccactcccagagcctgccccagcccttcgagccccctccccaataaagaattcacatcctccaatgacattcccccaggtgtgtccttgaacccccttcaactccccctgggccttctctcttggggtggggagatgtcaggcgggaaagggggcttgactggggctccccttccctaggaggtggccagtcagcccctgccttcccggagagtgggcccagcctccgaggaacccaggaagctgaagaggaagggtctgaggcaactccaggtgggggagtgcatggggcatgggatggaggccgctgcttcctctttctctggggctgaggggcagagggcttggggggagtggggtgaatgtgtgtaggtagcagttggaccatagaggtgaggtgaaaagggtgagctcggatagggatggggggctggagccgggtggcaggggtggggcaaaggggcaactttatgggccaagccaataggaatttggtatggaggttgaggaggtggggttaaggaaaggattagaattttggagtcgagctcaggggttttggaaagcactggtttaagagtaatggggtgtggatcggatgccttggctcatgcctgtaatcccagctaattgggaggcgggaggatcgcttgaacctgggaggcggaggctgcagtgagccgagatcgctccactgtactcccacctgggcgacagagcaagactccgtctcaaaaaaggtggttggcgttggtgtactagggcaggagctataggcagactacgaaatttgaactggctcgaaaaggccaaagagatgggcaagggcagaaaactggatttaactgtggctgggattagagttccgaggtgcaacctagtggggcaaattagaatagacatgcgtacccgatcagcattttgggaccgacgaagtgcgagcaagaggccaagcccctctccacctacactccgtaggagtaagatttcgaatctcagatggcctccccttcccccagagtgggattaggattttgggggcagagccaaggaaggactggttagaatagcaggcgttggcgaaggaaaggggagggcgggtcctctaggactggcttggtggaggttgatgaaggccgtgagatggggcgggggtgggagaggacagtttgcagccttgggtggcgcgggggcccagaccctctgtcttgggccacttgttggtcgggagccagatctcgccacacccgcgtttcctcgattgtaaacggttatgttgggagtgtttgctgctgcgtgggtccgctgagaggattagtctgggccccgtaaaccgcttagcgccgagcctgctgtggcaagggctcgaactggatgagagacgtggctagacgggggaggggtgctgggccgggggggaggtgggaagactgctcccctccgctgactcagccccttctctcctcagaggcaggccccgaaggccaggagacggcggagatcaccgacttccagagggtgcgtttctgcaaggtggtggcggcccctccgctgccgggggccgctcgctgaccgcgcccgccggaccgcggcctccgcgctctgcactaacctcccaccgcctcgctcctctgtcctctgcttctgccacactccagccaggagagggttaaatctaaggggggaggagccagggtctgcgagccgggcggggccagggcagtagtcgggtgcaggccccaccaacgggggacgtcacggcactgggacggctgggacgcttccgcgttagtctcccatggaggccctgggcggctcgagccagtcttcaggccgaatctcccgcctccaggattgcatccgaggcctggcagccggtgacacttccgaagggcttgaattactcgggcgccagccctgtcgtattaaacgcagtgcttccgctcacccttgaactgtgtttctggagggggcaggctgggtcgctgtgcttggcgggcttttctgtggcggaagaggcggaaggaaggggtcttcctccacccttctgatccgtcttccctcccccctcccgcaggcctccccgaattcctgaagacgctgctgggaggggactgaagcttccccgccttgatggggagggggcgtgaggaggggtttatctggatttccaggctgtgttctttctaccccagagcctagtctggaccccttggctctagggagagggaaaagctgaccgttggggaggagctgggagaaggggcgcgattgcggtgaggggcggagctggaacctcggggcctgaggtgctgaggatacctgaaagcgggctgagagtgtgctggaggaggcgggtcccgcgggggcggagctaggctgcctgggcggggccggaatcctgacaggcggagttagagcggggggcggggtcagcgcgcgcgggtggggctctggccatgggcatggggcggggccgtcagcgggggcgtggtcggggtgtcgcgcgggaacccgcgcgggaggagagcggggattccggaactagagtgtgggagccagaggccgtagcgggcagggctcgagcactggagtagagcagtccgacaggtagagaagtgagactggctgcggcacagggcgggttagggctccaggcagggcttgagcgggacgagggggcgggctccgaggcgggctagatgcctgggctggatgaagtccgagtctgggaagagaaccgtgttgtggcgggaggaggcggtgattggggtggtggggctaagcgcgggggcggggctggagcgaggggggcggggtagcacctccgcctgtcggtggtggggcggaggctggagggggtgggcctaggatgcggaggcggcagctcgcgtgggggcgtgaccatgctggcgggggcggggccggaggcgggcggtttagagagcggggcggtctgcggggtgggggcggggcctggtgggggcggggcctgtgcggtctgcggcgcggagccgagtgggctgcggggatgcgggggaccagctgcgtgggcggcggcgccgagagccccggaggcgcggggctgagcgagggcccgcgggggcgctggctgcgcttggctccggtatgcgcctacttcctctgcgtctcgctagctgccgtgctgctcgccgtgtactacggtctcatctgggtacccacgcggtctcccgcggcacccgccggcccacagcccagcgcgccgtcccctccgtgtgctgcccgcccgggcgtgccgcctgtcccggcgcccgccgctgcctccctctcctgcctcctgggagtccccggcgggccgcgaccccagctccagctgccgctgagccgccgccgccgctacagcgaccctgaccgccgtccgagccgccagacacccagagagacgccagaggccgcggaggggcgaagacccgggtaactctcccttccaccccaacccggatcgccagccctcgagagctctgtgctccacgccgaggatgcaccgtctctggattggtccggccttcttcctaatgacatcgctcagcgtctctggagccgtcatcccgcggaatgggggcccagggggtgtcagctcggggccttgcctcttgcagctactctgtggtcaggccgggtcctccaccatcaggaagatcccatcctgagctctgtctcctgcccctcctgctgtgggatgctgagcacagagcccacagcccatctgcctcttcacctccctgaatccgtgtccatctgcaataaacgacagcctcggctgcctcgtgctgtgtctgtcctgttgtctgcagagatgcctcccctcccaagtttgtgtgggaaagaccttcctggggtgtggcctttgtctgttttgtcccgggtgggctgttccccttccttaaggagctcttcttttcttggagtagggagaagcagcttagcagcagcagggcctttgaaggtcagacagtgggaagggcttcccagttttttgtgtgcttggagcaaaggacaaatgtctctggggagaagcagagtgtctgccctcgtgttacagcacaggagacaagaggaggggtggggtgatataggacaatagctggggttctgggaattgctgttggtgtaattatcatgtcagggacagaggctgaatcacccagggatctcagttggctgccgagagggaacgatgctggcccacttcctggggtcagagagatgagagtggatggcggcggcggtggtgttgcttctcagcctgtctggaaatctcagagccaatgaccaaagcgctgtgctgccttggaagactggtgcagcctctggcctggggcgctgctaggaaaccaaggccgggaaactgaggtctagcttctgggcaaggagtccgaggtggggaggccatgttccatcctggaagactgaggcctggctctggacagggcctgggatctgacatgcaggaagctggttcctgtccagcctccccgcttgagctggaggccttcccaggagagtgaggctgagcatcttctcccacgctgtggctcctggagatctgtggaggtggttaggaaggtcagctgctctgctcacctcccctttaccccaccaccactccccagagggtggttgtgaaggggaatctaggaagccagcacttctttgtagtcagcataggtgatagttaggggcactgactggggcgagactactcgggttcaaattccagctcctctcattacaaactgtgtgactttgggcaggtcacttgacctctgtgtttctttttttttttttttgagatggagtcttgcactgttgcccaggctggagtgcagtggcatgatcttgctcactgcaacctccgccttctggttcaggtgagtctcctgcctcaacctcctgagtagctgggattacaggtgcccaccaccacacccagctaattttttttttgtatttttattttttattatttttattttgagagaagtctcactcttgtcccccacgcttgagtgcaatggctcgatctctgctcactgcaacctccacctcccaggttcaaacaattctcctgtctctgcctctcaagtagctgggattaaggcccctgccaccacgcctggctaatttttgtattttttagtagagacgcggtttcaccatgttggccaggctggtctcgaactcctgacctcgtgatttgcccacttgggcctcccaaaattctgggattacaggcatgagccaccacacccggcctctgtttcttttttttttttttcttttgagacggagtcttgctctgtcgctcaggctggagtgcagtggtgcaatgtcggctcactgcaagctccgcctcctgggttcatgccattctcctgcttcagcctcctgagtagctgggattacaggcgcccgccaccacgcctggctaatttttgtatttttagtagagacgaggtttcatcatgttggtcaggctggtctcaaattcctgacctaaggtgatttgcccactttggcctcccaaagtgctgggattacaggcgtgagccactgcacccagccttataacttatttaaaatttttaagcattttttgtttgtttgtttaatagaaatggggtttcacactatgttagccaggctggtcttgaactcctgggcttaagtgattttcctaccttggcttcccaaagccctggaattataggcatgagccactgtgcctggccctgcctctgtggttctgtagaatgaagatgctaatggtacttcttcatagacttgctctgaggaataaataaactggtgatctcaagccctgagaacgatgtcacatgttctctctctccaccacctctgtccctcagggtttaaaagccccagctgggatcctctggggatagcaagtcagtccaaagccctggccaccagcaaatggtgagtttgagggaggggcctctccatttcggttcccactggcccccctctctttggttttcatctctcttctcccagccccattttttcctactctttcgtttccttgttgctgtgtgtcctggctcttttctctttctgtgtttgtctctctgcgtctcagtctttctgtgtcctgtttatctctctggtgtctcttggtattgtttctctctcccactctgtatgtctctgactcattctgctcattctgtgtcctccctattgctctctgtccccagctcgttcttttttttttttttttttttttagatggagtcttgctctattacccaggctggagtgcagtggcggtgggattacaggcgcccaccaccatgcccgtataatttttgtatttttaatagagagagggtttcaccagagtggccaggctagtcttgaactcctgacctcaagtgagcttcccgcctcggcctcccaaagtgctgggattacaggcgtgagacactgtgcccagccccagctgattctctttcttctctcctccacacttatcttaccccaacactttcttccaccttgctccccttcccctgcccccgcaccccacagcttccaggtccctagtctcagtgtcccctgtctccttccctttatctcttccttttctcctcctatttctcttggtttctcttttggtctccattgtttaatcttccttttaacaaatattttttgaggctgggcacagtggttcttgcttgtaatctcagcactttgggaggccaaagccagaggatcacttgaggccagaagttagagaccagtctgtgtaacacagcaagacttcatctggacaaaaaattaaaaaattagctgggtgtggtggtgcatgcctgtagtcccaactactcaggaggctgagaggagaggattgcttgagtccaggaggtcgaggctgcagtgagctatgattgcactacttcactccagcctgggaaacagcaagatcctgtctctaaaaaactaaaaaaacaacccacccaaaacccacaattattttttgagcatctgctgtgtgccaaagcttattttaaacactggagacacaggagtgaataaaacaggcaaaaattcctgctctcggctgggcgtgatggctcatgcctgtaaccccagcactttgggaggccaaagcaggaggatcacttgaggtcatgagtttgcgaccatcctgaacaacatagtgagatcctgtctctacaaaaaatacaaaaattagccgggcatggtggtgcatgccttgtagtcccagctactcgggaggctgaggtgagaggattgcttggaggtcaaggttgcagtgagctgtgactgtaccaccgcactccagcctgggcaagagagcaagaccctgtctcaaaaaaaaaaaaattcctgctctcaatggaactgaatattagtgggaacacagacaagaaattcagttaatagccgggtgcggtggctcatgcctgtaatcccagcactttgagagacctaggagggcggatcacctgaagtcaggagttccagaccagcctggccaacatggtgaaaccccgtctctactaaaaatacaaaaattagttgggcgtggtggtgggtgcctgtaatcacatctacttgggaggctgaggcaggagaattgcttgaatccaggatggggaagttgcagtgagccaaggttgcaccactacattccagcctgggtgacagagtgagactctgtctcaaagaaaaaaaaaaaaaattcctgttcttaatggaactaaatattagcggggacaaagacaagaaatgtgattcataactttgagtgaaagcagggtaagggtgatggggatgatggagggtgtggttactgggtagaagcccaagactggtgagggtgaggctggcaggtctctgggggctgagggaacagtaagtgcaaaaaccttcggggtggtgtgcctggcttgttgaaggaatagcgaagaggccagagtggctgaagcaagagggagtggggagagcaagaggaggaggtgaggcaagagaggacaggcagcttgatcagggcctcatggaccacagaatgcaattttttttttttttttgagacagtcttactctgtcacctaggctggagtgcagtggcgcgatctcggctcactgcaaccttcatctccctggttcaagtgattctctcgagtctcagcctcctgagtagttgggatttcaggcacgtgccaccacacccaggtaatttttgtatttttagtagagacagggtttcgccatgttgctaaagctggtctcaaactcctaacctcaagtgatccacccgcctcagcctcccagagtgcggggattgcaggcgtgagccactgtgcccggccacaatgtgcactttggatgaggtgggagccatgggaggcttctgaggtgaggagggtgtgcgctgattcagatctcaagaccttctgactgcgatgtggagaatggactgcagggggcgatggtggaagccaggagcccaatgaggacaccaccgccctggttcaggtgagagaccatggtggctgtgctagagtgttggctggggaggaggggagaagtggtcaaaaatccgtgtgtgggctgggtgcagaggctcacacctgcgatcacctcccagcaccctgggaggccaaggcaggaatatcacttgggcccaggcgttcaagcccaacctgggcaacatagtgagaccccgtctctacaaaataaaaataaacttttttttttaaaatgaaaaaagtaaaagcaaggcatggtggctcatacctgcaatcccagcattttgggaggctgaggctggagaaatgtttgagctcaggagttcaagactagcctgggcaacatagcgagaccccatctgtacactaaataaaaaatcagccaggcgtgatggcttgtgcctgtagtcccagctattctggaggctgaggcaggaggattgcttgagttaaggagttgaggctgcagtgagctgtgattgtatcactgcactccagtctgggtgacagagtgagaccttgtctcaaaaaaaaaaaagtgtgtgtgttgtgtgtgtatactgataaaaatacacatagcataaaggttaccattttaatcatcttaccatctttttttttttttttgagacagagtcttgctctgccacccaggctggagtgcagtggggcgatctctgctcactgcaacctccacctcccaggttcaagtgattctcctgcctcagcctcctaagtagctgggattacaggtatgtgccaccatgcccggttaatttttgtatttttagtagagacgaggcttcaccatattggccaggctggtctcaaactcctgacctcaggtgatccactgcctcggcctcccaaagtgctgggattacaggcatgagccactgtgcctggcccattttaactgctttaaagtgcacagtttcgtggcactaagtacatttacagtgttgtgcaaccatcaccaccattcatctttaaaatgttttcgtcttcccaaaatgaaaccccgtacccattaaacaccatctccccattccccctcccctcagcccctggcgagcactcatctactttctgtctatataaatatgcctgttctggacattttatataaaagcaatcataacatacagggccttttgtgtctggcttatttcacttgagtcatgttttcttttcttttttttttttttgagatggagtctcgctctgtcgcccaggctggagtgcagtggcgcaatctcggctcactgtaagctctgcctcccgggttgatgccattctcctgcctcagcctcctgagtagctgggcctacaggtgctggcgaccacgcccggctaattttttgtgtttttagtagaaacgaggtttcactgtgttagccaggatggtcttgatctcctgacctggtgatccgcccgccttggcctcccaaagtgttgggattacaggcgtgagccaccgcaccaccgcacccggccgcagcgtcctgttgtcaaggcttttctgggtgaaagcaagtatcagtgcttcattccttgtttttttttttcttttttcttttttgagacggagtgttgctctgtcaccaggctggagtgcagtggtgcaatctcggcttactgcaacctctgcctcccaggttcaagtgattcttctgcctcagcttccctagtagctgagactacaggcgcatgccaccacgcccagctagtttttttgtgtgtttttagtagagacggggtttcaccatgttagccaggctggtctcaatctcttgacctcaagatccacctgcctcggcctcccaaagtgctgggattacaggggtgagccaccgtgcccgcctgcttcattcctttttatggctaaataacattccattggccgggcgcagtggctcatgcctgtaattccagcactttgggaggccgaggtgcgtggatcacctgaggtcagaagttcaagaccagcctggccaacatggtgaaacccagtatctactaaaaacacaaaaattagccaggtgtaatggtgcacacctgtaatcccagctattcaggaagctgagacaggagaattgcttgaaccaggaggtgtaggttgcagtgagctgagatcgcaccactgcactccagcctgggcgacagagtgagactctgtctccaaaaaaaatttccattgtatggataggccacattttgcacattttgtttatccgttcatttgttgatagacagttgggttgcttccaccttctggctattgtgaatagtgctgctgtgagcatgcatgtacaatattttgtttgaacttttttttgggcagagtctcgctctgttgcccaggctggagttcagtgatgcagtcatagctcactgcagcctccaactcctgggctcaaacagtcctcctgcctcagcctcctgaggagctgggactacaggtgtgcgccaccatgcctggctaaatttttatttttttgtagagacaggatctccctatgttgtccaggctggttttgaattccagggctcaagtgatcctcctgtcttggcctcccaaagtgtaagagattacaggcatgagctaccatgccccgcctgataatctgtgtttcatttatggaggaactaccaaacaaaatctgtatatatatatatattttttgggacggagtttggctcttgttgcccaggctggagtgcaatggtgcgatctgggctcactgcaacctccgcctcccaggttcaagcgattctcctgcctcagcctcccgagtagccgggattacaggcacgcaccaccacgcctggctaatttttatttttagtagagacagggtttcaccatgttggccaggctggtctcgaactcctgacctcaggtgatccacccgcctcggcctcccaaagtgctgggattacaggcgtgagccaccacgtccactatgcccagccctgaatattcacattttttgctgcaaaaatattaccacgtctgatgggagagaagggggcgcctgcatcaggcctctgagagtgttacataatgcatggtattcactcaaaattgcctttctaaaattggaacaattctgagttctgcaactcatctgtccccaaggactcctgctaagggcttgcggacctgtaatttggcccactgccaaacctagattcatcttaattatttgctcaacatttatttaatggctcagggaaaaaactaactttctggtaattttttaaaagtagagaatgacgttcatttagtaagttcccattgtcaatgacatgctatttttagtgttgtgtggttaggcgaatgcgtgtttgtgtttgtgacggcctggatgagtgtgtctgtgcatgagggtgtggtttttgtgtgactgagtgtgtatatgtgagtgtgagtatgtaagtgtgaatgtgtgtatttgactgtttcagtgtgcatctgtgtgattgggtgtataaaagtgtgtttgctcctctaatcgcagcactttgggaagccgaggtgagaggattgcttcagctcaagttcaagaccagtctgggcaatatagcaagaccaagtttctacaaaacattaaaagattagcagattagcggggtgcggtggcgtgcacctgtggtcccagctacttgggaggctgaggcaggaggctctcttgagcctaggaggtcaaggctgcagtgaactgtaattgcaccgctgcaatccagcctgggtggtgacagcgaggacctgtgtcaaaaaagtatgcgtgcatgtctagttgagtctgtgtgtgattgtacattgagtgtgactgtgggtctgtgtgtgtgtgtgtgcatgtgtgagaacgtgtatgagaagaggcatggtgcagggtttaaggtttatatactgaaagaaagttctcatttcaggcgacatctgtgccctctgctattagaatttcagcggactccacaaaatcagcaaagaaatagtgtgctgtcaatcaataccctttttgtccactagaggtcgcctgtctactttgagcagaggaaactaatctatatttttacatttagttgctgggagtttgcagacacttccagagatgtgggaggtaggagtgtggggatgagaggtggagacgtgtgtgtgtgtgtgtgtgtgtgtgtgtgcgcgtgtgtgtagtttagctattgcctttactcacctcagctgtacatagagcagcgatcctcaaacttactagtctcaagactctttcattctttcttttttagacagggtcttgccctgttgcccaggctggagtgcagtggcctgctcatggctcactgcagccttgaactcctgggctcaagcgatcctcccatttcagcctcccaagtagctgggaccacaggcatgcaccactatgtctagctaatttttaaaatatttagaagagatggggggtcttgctatgttgccaggctggtcttgaactcctagactgaagccatccacctgtatcggcctcccaaagtgctgggattgcaggtgtgagccaccacacctgggtgagatgaatactattataaaagagcaagttcagcccccttttgcctctttgcctttctgctctctgctatgtaaagataaagcattcctgctctgtggagcaggaattcaaggaggtatcttggcttcagaatcacccaacctgccagtaccttgacattggacttcccagcctctagaaccatgagctaataaatttctctttataaattcaaggaggtatcttggcttcagaatcacccaacctgccagtaccttgacattggacttcccagcctctagaaccatgagctaataaatttctctttataaattacccaggctgtggtgttattttattttttatttttatttatttatttatttatttttgagacagagtctcactcttgttgcccaggctggagtgcagtggcgcaatctcagctcattgcagcctgagcctcccgggttcaagcgattctcctgcctcagcctcccgagaagctgggattgtaggcacccgccaccatgcctggctaatttttgtttgtatttttagtaggtacggggtttcaccatgttggccaggctggtctcaaactcctgaccttaggtgatccacctgccttggcttcccagtttcccaaagtgttgggattacaggtgtgagccactgcacccagcctgtagtatttttttggggggatgaagttttgctcttgtcacccaggctggaatgcaatggcatgatttcggctcactgcaacctccgtctcctgggttcaaatgattctcctgcctcagcctccctagtagttgagattagaggtgcccgccaccacgtccggctaatttttatatttttagtagagacagggtttcatcatgttggccaggctggtctcgaactcctgactttacgtgatccacccgcctcagcctcccacagtgcttggattacagttgtgagccactgcgcccggcctgtggtattattttatagcagcgctgaatggatggagacagtggttggtcctaatcctcaatgtgatgatattgggaggtgtggccttttggaattagtgcctttttttgttgttttttgttttttgagtctatcgccgaggctggagtgcagtggcacgatctccgctaactgcagcctccacctcccgggttcaagcaattctcatgaaaccccgtctctactaaaaatacaaaaaaaaaaaaaattagccaggcttggtggtgggcacctgtaatcccagccacttgggaggctgaggtaggataatcacttgaacctgggaggaggagtttgcagtgagctgagatcacgtcactgcactccagcctgggccgtagagctaaactcagtctaaaaacaaacaaacaaacaacaccaaatgtacccatgaagtgagtttaacaggcaaataagtttccttgggagactgaggtcccttaaaggggggacagcaatatgtgacaagtgtgtccctattctaaagaggactgttaaatcatctggaggccaggcgaggtggctcatgcctgtaatttcagcactttgggaggccgaggtgggtggatcacttgaggtcaggagtttgagaccagcctggccaacatggtgaaaccctgtctttactaaaaatacaaaaattagctgggcgtggtgacaggtgtctgtaatctcagctactcaggagtctgaggcaggacaattgcttgaacctagaaggcagaggttgcagtgagctgagattttgccactgtactccatcatgggtgacagagtgagactgtgtctttaaaaaataatgaaaaagctgggcgcggtggctcactcgtgtaatcccagcactttgggaggccgaggtgggcatgtcaagaggtcaggagtttaagaccagcctggccaacatggcaaaaccccgtttctactaaaaatacttaaattagctgagcatggtggcgggcacctgtaatcccagctactccggaggctgaggcaggggaattgcttgaacctgggaggcagatgttgcagtgagccgagataacgccattgcaccccagcctgggtagcaaaagcaaaactccatctcaaaaaaaaaaaaaaaaagataaaataaataatctggatatgacttcctcaaagctctggccttaaaatattttttgacctttagccaacttctcaaatatatatatgtgtatatatatatacacacacacacacacacgcacacacatatatatacacacacacatatacatatatatataaatttatatagccagcctatataaatattatcaagatttctttgggctgcatgttgtggctcatgcctgtaatcccagcactttgggaggtggaagtgggaggatggcttgagcctaggagtttgagaccagtgtggccaacatagtaagaccccatgtctacttcttttaacaaaatataaattttgttaataaagaatatttctggccaggtgtggtggctcatgcctgtaatcccagcactttgggaggctgaggtgggcatatcacctgaggtcaggagttcgagaccagcctggccaacatggcgaaaccccgtctctactaaaaatacaaaaattacctgggcgtggtggcaggcgcctgtaatcccagctccttgggaggctgaggtaggagaatcagttgaacctgggaggcagaggttgcagtgggctgagatcgcaccactgcactccagcctgggaaacagagtgagactccatctcaaaaaaaaaaaaaaaaaaaaatttgtttgggaagggttgtaggaatgctgcccatgatgatgatgagataggtgcttctccccatctcaagccaagtgagagaaagttctagaaaacccggcatgttttccctggagtttggaggacatgatgacaccgttgtagagctccagtaatttttttttttttttttttttttaatgaagtctcaccctgtcgcccaggctggagtgcaatggcatgattttggctcactgcaacctctgcctcccgggttcaagcacttcttctgcctcagcctcccgagtagctgggattacagttgcctgccaccacgcctagctaattttttgtatttttagtagagatggggtttctccatgttggtcaggcaggcctggaattcccgacctcaggtaatccgcccacctgggcctcccaaagtgctgggattacaggcatgagccactgcacccggtcctgcttttttattaaaaggaagctgtctctgaagtgtcatacaagtaaagggtctcataagtctccaaaggttcagaaattgtggttgtgctccatgaacacaactttcaatgagaagcctattattcagattgtccatctgtcatggtaatttgttgccctggtcctaaagttgtgattgaaattgaatttttcctttaaggctgtactgggcatttgtgactttcagttgccctggcaacagcacatcctccccacactgaataatactgatggtataaaaaacacatgcagccaggtgcggtgcatcatgggtggacatggggaaaccccatctctactagaaatacaagaaattagccaggcgtggtggcatgtgcctgtagtcccagctactcaggaggctgaggcaggagaatcacttgaacccaggaggcagaggctgcagtgagctgagatggcaccactgtactccagcctgggcgacagagcaagactctgtgtcaaaaaaaccccaaaaacaaaaaacatgcaaataaagtaaaaagtgataggtgggacggccacctgtcagctgttgagctctactgtgggagaaggtctggggaaggattgggaggggtgtacgccatgaagggtgaggctgggagtgttacacgtgttatgcacagtagcaggtattggttagaatgagataagctgctgtaacaaatagacccccctgctgcccagccaacaatggcttaaaaaagagagtttatggctgggcaaggtggttcatgcctgtaatcccagcactttgaaaggctgaggtgggagggatagcatgaggccagtaatttgaaaccagcctaggcaacatagcaagaccctgtctctataagagaaaaatttttaaaaattaggtgggcttggtgatgtgtgtctacagtctcagtattggggcttagcctgggagggttcttgactttgcccatgtaagaattcaagggtgagccagtggtgttatttttttttctttttccttttttgagacagagtgttgctctgtcacccaggctggagtgcagtggcatgatctcagctcactgcaacctccacttcccggtttcaagtgattcttgtgcctcagcctcccaagtagctgggattacaggcatgtgtcaccgtgcccggctaatgttttgtggaggtgaagtttcaccatgttgctggctggtcttgaattcctggcttcaagtgatccacccacctcgggctcccaagatgctgggattacatgcatgagtcaccgtgtctggctcagtggtgttaaatagcaacttttactgaagcctcagtgcacagctgcagcagaggaattgccccttgcagagcggggctaccccacaggcagtgtgcccagaagagcagcccagaggcagcactgctgtcatatttatacccacttttaattatatgcaaatcaaggggcagtttatgcaaaaatttctaggatgagggtggtaatttccagtcaccgggtcattgccatggaaagtggtgctaaggtccgagtgttgccatggcaatggtaaactgatacggtacactggtgggtgtgtcttatggaaaactgcttttgccctagacctgtttcagccagtcctcagtttggtcctgtgtacaagccctgcctcctacctcagtagggtagggcactgggcagaactgtgtgactcccattccaggccccagctcctggaggacatttcgaacacaccgtgagggggaagggaagctgctgtgttgaaggtaaggacccagtcctggcaggttcatcacctgctgactaaagagcccttgggccctgaataatcagcagcggtggccaggccaggtggttcacgctgtgggccttaggtgagactcaaacgtgatggcttcaggtggaacctggcacattcccggctgtggtggctacatgggagagactccttctgcttgagaaagcagagaggccaggcgtggtggctcatgcctgtaatcccagcactttctgatcaagtggatcacctgaggtcaggagttcgagaccagcctggccaacatggtgaaaccctgtctccactaaaaatataaaaattagctgggcgtggtgggggtcggggggggcgcatgtaattccagttactcgggaggctgaggcaggagaatcgctcgaacctgggaggcagaggctgcaatgagtccagttcacgccattgcactccagcctggatgacagagtaagacactgtctcggaaaaaaaaaaaaaaaaaaagcaaagggaagtctgggcgtgatgtctcatgtctgtaatcccagcactttgggaggctgaggtgggtggatcatctgaggtcaggaattcaggaccagcctggccaacatggcgaaaccccatctctactaaaaatacaaaaattagccaggtgtggtggtgcatgcctacaatcccagctacttgggaggctgaggcaggagaatcgtttgaatccgggaagcagaggttgcagtgagctgagattgcgccactgcactccagcctgggcaacagagcaagacaatgtctcaaaaaaaaaaaaaggaaagcaaagtgaagagtaaatgcaacttcgtcttgcagcttagctgccagcttggccacagaggggtagagccccaagtgcactcttggggtccccgattccaggccatggctcttggacagcatttttggacctgccctgggccagagggaagtccacagccttgaagggagagttctaggcctggcaggattcactgcaagctgaccgaagagcgcttgggcctggagtgaacatcagtggtggccaggcagtacttgccgtgggcctggggtggtggccacagggagagacttcttggcttgtgggaaggagagagaagagtgggaaggactttgtcttgtggcttgggtagcccctcagctatagtagaatagagcgcccagtagattcctaaggtttccaactctgggttcaagctcctgcatggcatctctggacccacccagggccggggggacctcgccatcctgaagaaatgaacacaagtctgctggcttcaccacctactggctgtagaacgctcgagcctagagtgaacataggtggtttccaggctctgggtacagcgggccttgggtgagacccagggctgtgctggcttcaggtctgacccagtgcagtcccagaggtggtggccacagaggagcttgtgtcacccctcccccaactccaggcatctcagcacagagagactctggaaaaagtaagggaagagaacaagagtctctgcctagtaatccagagaattattattcttcttttatgaaacagactcttgctctgacacccaggctggagtgcagttgcgtgatctctgctcactgcaacctctgcctcccagattcaagtgattctcctgcctcagcctcccaagtagctgggattacaggcgcccaccacaatgcctggctaattttttgtagttttagtagagatggggtttcactatgttggccaggctggtctcaaactcctgacctcaggtgatccacccatctcggcctcccaaagcactgggattacaggcatgagccaccatgcctggcttacatatcttaactttttccttacagtttccctctctctgtcccttacaggtgcttctggaatagtattttcatctcgtccacttttttttttttttttttgagacggagtctcgctctgtcgcccaggctagagtgcagttgcgcgatcttggctcactgcgagttccacctcctgggttcacgccattctcctgcctcagcctcccaagtagctggaactacaggcgcccactaccacgcccaggtaattttttgtatttttagtagagacaaggtttcaccatgttagccaggatgatctccatctcctaacctcgtgatccgcctgtctcggcctcccaaagtgttgggattacaggcgtgagccaccgcgccaggctgaagtgcagtggtgtgaacatagctcactgcagcctcgatctcctggactcaagcaatcctcccacctcagcctccccagtagttggtactacaggtgtgcaccaccacatccagctaattttttgatttttttatagagatgggctttcgctgtgttgcccaggctaattttgagctcctgggctcaagcgatcttcccgtgtcagcctcctaaagtgctgggattacaggcctgaaccaccaagcctggcctcatttattcatttttaaagccctgtctattctgccctctgatacaccatccaacacataattatttcaataattgagtttttcatatccctcatctcccgttagcttctgcttcataacctcctcttctcgcttcgacttgccattatcctccgtcatttctctgaggatgtttgttatgtgtagtttacatgccttattagctctacttcattgggaatagtttcttccaagcccaactgagatatttgggcctcctgggtatgctggcaattatatgcctcagaaaaggtaacaattcactgcttcttaagactatggtagtttatggccaggcgcagcagctcacgcctgtaatcccaacacttaggaaggccaaggcgggcagattgcttgagcccaggagttcaagaccagactgggcagcatggtgaaatctagtctctaccaataacaaccaaacacgcaaaaaatccaaaaaacaaaactgataattttgagggttttttttttttgagcattgatttagaggtgaagtagagaaaccaatttgttttcttttttcttttttttttttgagacacggtctagctgtgtcactcaggctggagtgcagtggtgcagtctcggctcactgcaacctctggctcctgggttcaggcaattctcctgtctcagtctcctgagtagctgggactacaggctcgtgccaccacgcctggctaatttttgtatttttagtagagacggggtttcaccgtgttgcccagggtggtctcgaactgctgtcctcaagtgatctgcctgccttggtctcccaaagtgctgggattacaggcatgagccaccgggcctagccctctcctctcggttttctctggcaccatggaacctacttggaccccaggtgcaccccaaaagtgtggggatgtgtaatgtcttcctttgtaacgcccctgggaagctcttccctaaaggccaggcgagtttgctgcatcaatgccccagccacttcctccttcatttttattttatttatttttaaattgcctttataataatggcaaaagctggctggatgcagtggctcacgcctataatcccagcactttgggaggccgaggcaggtggatcacctgaggtcaggagtttgagaccagcctggccaacatggtgaaaccccatctctactaaaaacacaaaaaattagccaggtgtggtggctcagggctgaatcccagccactcaggaggctgaggcaggagaatcgcttgaacctgggaggcggaagttgcagtgagctgagattgtgccactgcactccagcctgggcaacaagagcgaaacttcatctcaagaaaaaaatgcaaaagcttttcattttgatgaagtccaattggccagcctacatttaaaaaaaaatttgaattttcattttttttattttttagagacatggtctcactctaacccaggctggagtgcagtggtgtgatcatagctcactgtagcctccatctcctgagctcaagagatcttcctctttttttttttttttttttttttgagacagagtcttgctctgtcaccaggccagagtgcagtggcatgatcttggctcgtggcccactgcaacctctgcctccctggttcaagcgattttcttgccttagcctctcgagtagctgggactacaggcgtgcaccaccatgcccagctctttttttcatttttagtagagacggggtttcaccatgttggccaggacggggtttcaccatgttggccaggatggtatcgatttcctgacctcgtgatcctcctaccttggcctcccaaagtgttgggattacaggtgtgagccaccgccctggcctctgtttttttgagacagagtcttgttctgtcacccagactggagtgcggtggtgagatctcggctctgcagcctctgtctcccaggttcaagcaatcctcctgcctcagccttgtgagtagctgggattacaggtgtgtgccaccaggctcggctgatttctttgtattagtagtagagacagggtttcacggtgttggccaggctggtcttgaactcctgacctcaagggatctacctgcctcggcctcccaaagtgctgggattacaggtgtgagccaccgtgcccggctcatgatcctccttcctcagcctcccgaatagctggaactacaggcacaagccccatgtctggctaatgaaaaacaaattttttttgagagatgggatctcactatgttgcccagactgatcatgaactcctggcctcaggcattcctcctatcttggcctcccaaagtgctgggatcacaggcttgagccaccacgccggcccactcctcatccttcagtgggaagattcggaggtattttctgcttggtttctcagagcatccccagccgtattgagccccggtttcccccagctgtgacgcactgatcagcacgcgcttattggcttttctctcatttctttcttatttttttttttttgagatggagtcttactctgtcgcccaggctggagtgcagtggtgtgttcttgggtcagtgcaacttccgcctcccgggtttaagagattctcctgcctcagcctcccaagtagctgggattacaggcgcccgccagcatacttggctaattgttgtatttttagtagagacagggtttcaccatgttggtcaggctggtctcgagctcctggcctcaggtgatctgcctgccttggcctcccaaagtgctgggattacaggtgtgagccactgcgcctggccttgtttctgacttggttctctaactcactcctgcttcctgggatcacctcccaaataaactgccatcacccaagtcattgtctcagaatctgcgtttggggaacccaagcaaatctgccactcttctgtagatgttgatgtagtttcatatgtatttctttgcccacaagaccttgttaccttcttggagggcttattaaaatggagaaaattgccaggtgcaatggctcatgactgtaatcctagcactttgggaggctcagacaggcggatcacttgcggtcaggaattctagaccaccctgggcaacatggcaaaaccctgtctctactaaaaatacaaaaattagccaggcatggtggcacacgcctgtaaacccagctactcgggaggctgaggcaggagagtcgtttgaatccgggaggtggaggctgcagtgagccgagattgcaccactgcactccagcctgggtgacagagcaagactctgtctagaaaaaaaaaaaaagaatacaaattgcttatttccaagaaaacatctctgccgtgctttcagattttcagctgattacaaatcacgcacccatgatcaaatccaacaagagatagaccccctgccataaaggaagaaggctggctgggtgtagtggcttatgactgcaatcccagtgctttgggaggctgaggcaggaggatctccgaggccagcagttcaagaccagcttgagcaatatagcgagacaccccctcatctctccaataataataaaaaaaatcagccaggcatggtggcgcgtgcctgtagtccaatctactcgggaggctgaagtgggaagattgctccaggagttcgagtctgcagttggctgagatctcgccactgcactccagccagggcggtagagccaaaccttgtctcaataaaatctccacaagggggcgccatctacatgatgatagcaggaagggaaccggccagtgtctcctggtgacgtactcattcagcgcttcttataccttaaaggtgaccaggaatcacctgggggtcttgttaaaatgcaggttctaattcagcagggctggagcaggaccacagctcttgcatttccctccctccttccttccttcctccctccctccctcccttcctccctccctccctcccttccttctctttcttctttctttccttctctctctctctctctttttttttttttgacagagtctcgctctgtcacccaagctggagtgcagtggtgtgatctcggctcactgcagccttcacctcctgggttcaagcagttctcctgcctcagccttccgagtagatggtgtcaggcctctgagcccaagctaagccatcatatcccctgtgatctgcacgtatacatccagatggcctgaagtaactgaataatcacaaaaggagtgaaaatggcctgttcctgccttaactgatgacattccaccacaaaagaagtgaaaatggccagtccctgccttaactgatgacattacctcgtgaaattccttctcctggctcatcctggctcaaaagctccaccactgagcaccttgtgaccccccacccctgccagccagagaacaaccccctctgactgtaattttcctttacctacccaaatcctataaaacagctccaccccatctcccttcgctgactccctttttggactcagccctcctgcacccaggtgattaaaagctttattgctcacacaaagcctgtttggtggtgtcttcacacggacgcgagtgaaagatgggatcacaggcccccaccaccacgcccaggtaattttttgtatttttagtagagacagggtttcactatgttggtcaggctggtctcgaactcctggcctcaggcagtctacctgccttggcctcccaaagtgctggattacaggcgtgagccactgcgccccgccaagatcttgcatttctaacatgtccaggaagcttgatgatgcggatcgagaaaacacactttggtagcgagggggctatggccttaaagttgggtaactgaaggggactccccacctggacccgtttgccctgttcctcaagccagctcaggttagcatcttcattattttattatttgtattttttttgagacagagtcttgttttgtcactcaggctgcagtacagtggtgcaatctctgctcactgcagcctccacctcccgggttgaagtgattctcctgcctcagcttcctaaatagctgggattacaggcacccgccaccactcccagctaatttttgtatttttagtaaagatggagtttagccatgttggccaggctggtcttgaactcctgacctcaagtgatctccccacctcagcctcccaaagtgttgagattacaagcatgtgccaccatgcccatctaattttttttttttttttttttttttttttttttttgagacggagtcttgctctgttgcccaggctagagtgcagaggtgcgatcttagctcactgcaagttctgcctcccaggttcatgccattctcctgcctcagcctcccgagtagctgggactacaggcacccgccaccatgcccggctaatttttttgtatttttagtagagatggggtttcaccatatgagccgggatggtctcgatctcctgacctcgtgatctgcccgcctcagcctcccaaagtgctgggattaaggtgtgagccactgtgcccggccaatttttgtatttttaatcaagacagggtttcgccatgttggccaggctggtctcaaactcaaggcctcgagcaatcctcctacctcggccttcaaagtgctgagattataggtgtgagtccctgcatctggttctaactgtatttttgtacccattaacccatttttctttatgtctccctcccaccttcccttctcagcctcaggtaagcaacattcgactcgaatcacactcttaaacacttacaactttagaattagagaattctagaattttcagtgtaataatatcagcttccattctgtatttttttttttttttagttgttttagagacacagtcttactctgttgcccaggctggagtgcagtggcacaatcacagctcactgcagctggtcggataactcctgggctcaagtgattcttccacctcggcctcctgagtagctgggactacaggtgtgtgctactgtgcctggctaatttaaaacaattttttttttgagacggagtcttgctctgttgcccaggttggagtgcagcggtgcaatctcggctcactgcaagctccgcctcctggattcatgccattctcctgcctcagcctcccgagtagctgggaccacaggcgcccaccaccacgcccggctaattttttgtatttttagtagagacggggtttcaccgcgttagtcaggatggtctcgatcttctgacctcatgatccgcccacctcggcctcccaaagtgttgggattataggcgtgagccaccgcgcctggccaaaaacaatttttttctgtagaaatggggtcatgctatgttggcctggctggtctcgaactcctgagctcagtgatcctcccacctcagcctcccaaagtgctgggattacaggtatgaaccaccacgcctggcctccattctgcattctgtgagcttgcacgtctcatctccacctactttgttggttatgaaggcttagaagagcccctggtcctgagcaagcactatgattattactattattttaaaattattattattatttttgagatggagtttcgctctgttcgcccaggctggagtgcaatggcgacatctcggctcattgcaacctctgcctcctgggctcaagtgattcgcctgccccagcctccccagtagctgggattacaggtgcgtgacaccatgcttggctgatttgtgtattttatttatttatttattttgagacggagtcttgctctgtcgcccaggctggagtgcagtggcatgatcttgactcactgcaacctccgcctcccaggttcaagcaattctcctgcctcatcctcccgagtagctatgattataggcacatgccgccacgcttggctaatttttgtattttcagtacagatggggttttaccatgttggacaggctggtctcgaactcctgacctcgtgatctgcctgccttggcctcccaaagtgctgggattacaggcgagtgacatcatgcctggctaaattgtgtattttatttatttattttttttgagatggagtcttgctctgtcacccaggctggagtgcagtggcatggtctcagctcactgcaacctctgcctcctgggttcaagtggttctcctacctcagcctcctgagtagctgggactacaggcgtgtgtgaccacacccggctaatttctgtatttttagaagagacggggtttcactatgttggctgcgctggtctcgaactcctgatctcgtgatccgcccgcctcggcctcccaaagtcctgggattacaggcatgacccaccaggcccagccacccggccctatttttattattattgctggtgctgatgttttctgcccgcctttgagatgccctcagcttggcgcatcctccagcttcctcctgcctgtatccctcccccggtgcttattgcggcctctgggccttactcagaccccccgtggtgctagagtttctggtaagttggtcaggccagggtcggataactgcatgggcacaagcattgccgctgatgagcccaccacatcctgcctcaaaagccactgtggccacagctgaggaaccctcgtgccaagggagtggagggtggtaagtggtggtcaaccagcccagtttggctggttctgggcttcctgtggccgctggcaagctggtggctgggcacagctgcttctccttgggatgtggtagctgcagccgcctgctcagtccatccttcctgatgggggttggcattgcacggtgcgatgggtttgtgaatgcaaaataacatgtgctccatgtgccctttggtcatgatttctttctttctttctttctttctttctttctttctttctttctttctttctttctttctttttctttccttccttccttccttctttctttccttccttccttccgcctttctttctctttctttctctctctctttctttctctctttctttctctttctttttctttccctccctccctccttctctcctttccttccttccctccctcctctctctctttctctgtttctctttctctatttctccttccttccttccttccttccttccttccttccttccttccttccttcgtcttgtcttgtctttttcttttcttttcttttctttcttttttttttttgagacagagtttcactcttgttgcccaggctggagtgcagtggcgcgatctcagctcaccacaacctccgcgtcctggtttcaagcgattctcctgtctcagcctcccgagtatctgggattacaggcacgtgccaccaggcccagctaattttgtatttttagtaaagacagggtttctccatgttggtcaggctggtcgtgaactcccaacctcaggtgattctcccgcttcggcctcccaaagtgctgggattacgggtgtgagccaccgcacccggccttttttcttcccttcctttcccttccctcccctcccctcccctcccctcccctcccctcccttcccttcccctctcctctcctcccttcctcttctcttcccttcccttcaccatgttggccaggctggtctcgaactcctggcctcaggtgatccgtccgcctaggcctcccaaagtgctggaattacaggcgtgagccactgcgcccagcataaaaaaaggacttctattgatatataaaaatacagacagaagagttcaccaataataagcttaaagaatttttacagctgaatatccctgtgtaaccaacactcagatcaagaaaaagacttttcccagcatccagacccccgccttccgtttttacccctcaaaaataacttctttcctggcttataacatcgaagtctagttttgtgtgttcttgattttttttttttttttgagttggaatcttgctctgtcacccaggttggagtgaaatggcatgatctcggcttactgcaaacttcacctcccgggttcaagtgattcctgtgtctcagcctcccaagtagctgggattacagatacccgccaccatgcccgactaatttttgtagttttagtagagatggggttttgccatgtcggccaggctggtctggaactcctgacctcaggtgatctgcccacctcggcctcccaaagtgctgggattatagatgtgagcagccattcctggccttattgagatcttttacaatctgtttttttggtactaagtctttgaaatccagtatgtgtgtcattttcacggcccatgttaatatggactcactgtatttcaagcactcagtgcccagatgtggctggtggctgccgtaatgggcattgctggtctggatcttgaagaagaggatgaagggacactggcacaaaagttaccaacacaggccaggcgcagtggctcatgcctgtaatcccagcactttggaaggccgaggcaggtgggtcatctgaggtcgggagtttgagaccagtctgaccaacatggagaaaccccatctctactaaaaatacaaaattaacctagcgtggtggcacatgcctataatcctagctactcgggaggctaaggcaggagaatagcttgaacccgggaggcggaggttgtggtgagccgagattacaccattgcactctagcctgggcaacaagagcgacactccatctcaaaaaaaaaaaaaagttaccaacataaaaaatggtgtgtacacactctgtcctgcaatttcatttctagagagtcatctaccataaatacttgtacatgcatacgagaatatatatacaaaggtgctcattatattataacccaaaatattggaaaccacctaaaatttcaccattagggaggtgattgagtaagcaaatttaaaactaacaacagacttcttcttcttttccttcttcttttttttttttcttttgagacggtgtctcgctctgtcgcccaagctggagtgcaatggcgcggtctcggctcacttcaacctccacctcctggttcacacgattttcctgcctcagcctcccaagcagctgggattacaggcgtgtgccaccacgcctggctaatttttgtatttttagtagagacagggtttcaccatgttggccaggctggtctcgaactgctgacctcgtgatccacctgcctcggcctcccaaagtgctgggattacaggcgtgagccaccgcatccggccttcttcttcttcttttcttttttgagacagggtctcgctctgtcacccaggctgggtgatcatagacagtggtgcgatcatagctcactgcagcctcaatctcccaggctcaggtgatcctcccacctcagtctccagagtagccgggaccacaagtgtgcaccactacacttggctaatttttgtattttttgtagacatggggtttcttcatgttgcccaggctggtcttgaactcctggcctcaagcaatcctccctccttggcctctcaaagtgctgggattacaggcgtgatccactgcacccagctaaaggatttcttatgctgttaaaacagaacaaagtgttttaaaatgtatttacaaaaacatcattctgacgccaggtgcagtggctcttgcctgcaatcccaacactttgggaggctgaggtgagaggattacttgagcccaggagttcgagacaagcctgggcaacatagtgagacccccgactctacaaaaaataataaaaccaaaatgaaaaccaaaacgttatccagaaaaacaaagtgataaagtacattactggggcccagcatggtggctcacacctgtaatcctagcactttgggaggtcgaggtgggaggatcacctgaggtcaggagttcgagaccagcctggccgacatggcgaaaccccatctctactaaaaatacaaaaatttggtggctcatgcctgtaatcccagcacttcgggaggccaaggcgggcggatcacgaggtcaggagatcaagaccgtcctggctaacacggtgaaaccctgtctctactaaaaaaaaaaaaatacaaaatattagctgggcatggtggcgggcgcctgtagtcccagttactcgggaggctgaggcaggagaatggcgtgaacctgggaggcggagcttgcagtgagccgagatcacgccactgtactccagcctgggcaacagagtgagactccatctcaaaaaaaaaaaaaaaaaattagccgggcgtggtggctgggcgcctataatccaagctacttgggagactgaggcaggagaatctcttgaacttgagtggcggaggttgcagtgagccgagattgtgccactggactccagcctgggcgacaaattgagactctgtctcagaaaaaaaaaaaaaagttattggaacaactggtgaaatttcagtgagggctgagtatagtgtggtatcagtggcatatttccttattttgataaatatattgtggttatgtcagagaatatcctgtcataaccgcaatataagagatacacagtaacaaatttatggtaaaggagcatgatgtttccaaagtactctcaaatgattccaggaaaaacataagtagacatagatatatacgcctgtattatttttctagggtttaccagcccccacaattgcatgagccaatttctttttttctgtgtgtgtgtgacaaagtttcgcccttgtcactcaaggctggagtgcaatggcacgatctcggctgactgcaacctccacctcccgagttcaagtgattcttctccctcagcctcccaagtagctgggattacaggtgcccaccaccacacctggctaattttttgtattcttagtagagatggggtttcaccatgttggccaggctggtcttgaactcctgactttcaggtgatccacccgccttagcctcccaaagtgctgggattacaggcgtcagccaccgtgcccggcctctgtctttttttttttttttttttcgagacagggtcttgctcttttgtccaggttgcagtgcagtggcacaatcataggtcactgcagcctcgacctcctgggctcaggtgatcctcctgcctctgcctcctaagtagctaggactataggtgtgctccaccacacctggataattttttgtgttttgtagagatgggggtttcactatgttacttaggctggtctggaactcctggactccagtgatcttcccaccatggcctcccaaaatgctaggattacaggcatgagccattgcttctggccccaattgctttctttttctttctttctttttttttttttttgaggcagagtctcactttgtcgcccaggctggagtgcagtggtatgatctcggttcactgcaacctcttcctcctgagttcaagtgattctcctgcctcagcctcccaagtagctgggactacaggtgcctgccaccattcccagctacttttttgtatttttattaaagacggggtttcacaatgttggtcagcctggtctcgaactctttacctcaagtgatcttccctcctcggcttcccaaagtgctgggattacaggcgggagccaacgcacccggccgcttttactattcttgcaacttttttcatttgacattccatcgaaataaaaagttaaaaaaattctttttcttctgagggggtgttttatcaaggacacctttatcaagggtcccgggcctaaaaatgttaagaacccatgatttacggctgaggaggcaacttccatccaaaatcctaaaagtcaagttcctgtgacctggcttcctgaacctccccgctcctgcgccccctggaggtcagggctagaacaacacggcattcctataatgctccaaatcgccacaaatcgaccttggaaatcctgggtgagtaacgcagactgcgcacatggcttcaattagcggaactaaaacttgctgaacatcgtgtacccgcgtgtccatggccaaacacaaactccacctttgtaaaagtctaggtgaattcccagctgaattcagaagcgtgacaggaatgggacttttcattggtgtctttttcttttttctatttttagagtggggaggagtgtatttctggattgtttaaatatttacaatgagcatgcatttcctttgcaattaaaagaaaaccagatttttttttttttttttttgaggcagaatgttgctctgtccccaggctggagtgcagtggcgcgatctcggctcactgcaacctctgcctcccgtgttcaagcaattctcctgcctcagcctcctgagtagctgggactacaagtgcccgccaccacgcccagctaatttttgtatttttagtagagacggggtttcaccatgttagccaggatagtctcaatctcttgaactggtgatctgcctgcctcggcttcccaaagtgctgggattacaggcatgaggaccgcacccggccgaaaaccagatttttaaaaattgaagtttgctgtagaaaaatactgtgggagaaagttgtgggtggtgttttgtagagtcgcagaaggacatgggaaaaaaaaattgagtgtgtttctgtaatcatcataacaatcacactcattgtgccgtaggctccaagggagggctctgagctgtggttaccagataaaatacaagattctcaggtaaaatgtgaaaaaaaaaatatttttgtgatcttaactcactgcagtcttgatctcctgggctgaagtgatcctcctgcctcagcctcccaggtagctgggaccacaggcacgtgccaccatgcccagctaatttttaatttattttgttgagatgggatctcactatgttgcccaggctgctctcaaactcctggcctcaagcgatctttcctcggtgtccccatgccctgggattacaggtatgaagcaccaggcccaaccctgaaatttaaagttaactgggcagtctgtaatgtgtttttgtttgtgtaggtgtgtgtgctaaatcaggcaaccccctattctgagcagaggagtgctttgatctgacttagattttaataggctccctctggttgctggtggagatgagactacggagggggggcagtgaagatcccagagaggaggctgctgtaatggtccaagcagaaggtgatagtgatttggatcagggtaacagagccgaggtggtgagaggttgacaggtcatgcatctatttcgaaggaaaggccatgtccaggctccttagctcggcattcaaggcttctctccaccactggacacacttactctctagcttctcagaccctgttgcagatagaatcatgatccccaatgatgtccacatcttaatcccctgaacctgtgaacaggtgaccttccatggcaaaagggactttgcagataggatgaagttaaagatctttagatgggggagcgattatcctggattgggtctgggtgggctcagtggaatcacaagagtccttatatgaggaagatagaaatttgagacatacggtagaggaggaggtgatgagaccacagaggcagggacgggcgtggtgcaaccacaagccaaggaatttcaggagccacctgaaggtgggagaggcaaggaacagattctcccctggaacctctggagggagtggtgacatcttgattttggacttctggcctgcagaaccatgccaaaataattgtctggctttttttttctttttttttccttgaggtggagtcttgctttgtcgcccaggctggagtgcagtggtgccatcttggctcactgcaacctccacctcccgggttcaagtaattcttgtgcctcagcctcccgagtagctgggactacaggcatgcaccaccacacccaggtaatttatgtatttttagtagagatggggttttgccatgttggccaggctggtcttgaactcttgacctcaatgatctgcccgcctcagcctcccaaagtgctgggattgcaggcatgagccactgcgcccggtcctggtgttaagcccgcagtttgtgctaattggttacagcagcctcgggaaggtaatctaggctccttccttgccccaggctctaggaagtatcttagcccccagccctgggctgcagacctgtaccagtccatggcctgctaggaaccatgcagcatcgcaggaggtgagtggcaggtgagtaagtgaagcttcatctgtatttatagccacgccccttcgctcatattaccgcctgatctgtcagatcaggggcggaattacattctcataagagcgtgaacccaggccgggcgcagtggctcaagcctgtaatcccagcattttgggaggctgaggcgggtggatcacgaggtcaggagttcgagatcagcctggccaagatggtgaaaccacgtctctactaaaaatacaaaaattagccgggtgcagtggtaggcacctgtagtcccagctactcgggaggctgaggcaggagaatcgcttgaacctgggaggcggaggttgcagtgtgccgagatcgtgccactgcactctagcctgggtgagagagtgagactccatctcaaaaaaaaaaaaaaaaaaaaaaagagcatgaaccctgttgtgaacagcgcatgtgagggatctgggttgcaagctccttatgagaatctaatgcctgatgatctgtcactgtatcccatcacccccagataggaccatctcgttacaggaaaacaagctcagggattccactgattctacattatgttgaattgtataattatttcattatatattacaatgtaacaataatagatggagatggttgtggcttgtgtagttgggggacagggtagctccattttctattgccaactttataaccctagaaggatgatttttttcttttcttttctttttcttttcttttttttttttttgagattgagtcttggtgttgtcagcctgggctggagtgcaatggtgcaatctctgctcactgcaacctccgcctcctgggttccagcaattctcctgcctcagccttctgagtagctgagattacaggcacccaccaccacgcctggctaatttttgtatttttagtagagatggggtttcaccatattggccaggctggtgacgatggttttttttttttgagacagagtcttgctttgttgcccaggctggagtgcagtggcgcaatcttggctcactgcaacctctgcctcccaggtttaagcaattctcctgcctcagcttcccaagtagctgggattacaggcacctgccaccacacctgggtaatttttgtatttttagtagagacagggtttcaccatgttggccagactcgtcttgaactcctgacctcaagtgattcatttgcctcagcctcccaaagtgctgggattataggtgtgagccattgcacctggccctagaaggaagatttaacagtaaaatatacttaaatgctgggctacctccgcagactagctcagcctctttgggtctcaaatcagcctggccgggaggctgagtggaggttacagtctctgctttcttgaatcccaagggaggggtttaagccaactgcattcctgagcttttgcccagaaggctggcgtcttaggaggaaagagatagatggctccaggccgggcgcagtggctcacacttgtaattctagcactttgggaggttgaggtgggtgattgcctgagctcaggagtttgagtccagcctggccaacatggcgaaaccccgtctttactaaaaatacaaaaaattagccgggggtggtgacacacacgtgtaatcccagctactcgggaggctgaggcaggagaagtgcttgaacccaggaggcagaggttacagagagccgagattgcaccactccactgcagcctgggcgacacagcaagactctatcaaaaaaaaaaaaaaaaaaatgagagagaagagatggccccaaatagggaaaccaaggccaggagaggggccgagcctgcacaggagcttcctcggttttccgagcgccggccccccttctctgcctgggaggaggtggttagagtcccctgggtgtgtgccccgcagagggagctctggcctcagtgcccagtgtgcagaccaatgagagccccagagagaaagacggtcatttcctccctgcatcttcccttggggctttaaaaaccacagcccttgggcaggagggaccttcgatcctcggggagcccaggagaccagaacatggtgagtctcgaaggggaatgggagcaggaaactttgtcctgggtccctcccatctttgctccagtgggtccttctctctccccaactctcgccgtcaactctgtctgtctctccctttccttctctctccctgtcttccacctcccaccttccctctctcctgcatcccaggctctcacactccagggctgggatgtggccatgggaataagattgtcaagattgtgggagcaacagcaacctcgtggggctggggcccgagaagattccccaggggaggggacccttgagttgggtctagtaaggtgactaagaattccacaagcagccgagcgcagtgggtcacacctgtgatcccagcacattggggattgtgccaaggcgggaggattgcttgaggccaggagttcaagaccagcctggccaacatagtgagaccctgtctgtatttttttttttatttaaagaattccacaagtgaagaaatctagaacaggccttccaggcagtgggaatggcagagaaaatgttgggaggctggaaagaaccagtttggaggaatggtcaagttactcagatgctcttgcagatagatgttcttttctttttcgacttggggtcttgcactgttgcccaggctggagtgcagtggcaccatcatagctcactgcagtcttgaactcttgggctcaagtgatcctccctctttagcctcctgagtatctgggaccacaggcatgcaccactatgtccggctaatttttaaaatttttattcttgtagagatgggttcttgctatgttgtcagggctggtctcaaattcctggcctcaagccatcctcccaccttggtctcccaaagctctgggattactggcatgaggccattatgcctggtcgtttgagatgttctgcatgacagagatggggaaactgaggcccaggcaggagcagagatggatggggaccctccatggttggtggcagaagcaggttatgccatggattctgtgagtgtcagaaggaatgcaccccaggctaaatgagggtccctgtcatccctgcgtctggaggcctgggcactgagccagcagagctgcgattcagcacctgctgtaacacaggcattgccttgcttcatctgtgtcaaagaggaaacggaagatggtttggatggaccagggaggggtctgatgttgcttcattcctgcattccacccttgagatccgacttgggcaaacgggactctctgattcttcttcttctttttttttttctttccaaaacattttccaaagtaccaaatgatacttggtaaaaactcattctcggccaggcgcggtggctcatgcgtgtaatcccagcactttgggagactgaggcgggcggatcacaaggtcaggagattgagaccatcctggccaacatggtgaaactccgtctctaccaaaactacaaaaattagctgggcatataagcgggcgcctgtagtcccagcacttgagaggctgaggcacgacaatcgcttgaacccatgaggcagaggttgcagtgagccgagattgctctactgcactccagcctggcaacagggccatctcaaaaaacaaacatagaaaaaaaaaaactcattctccctgcctaccccagagcctctgactccttttctttccttttattttgagacagagtttcactcttgtcgcccaggctggagtgcaatggcacgatcttggctcaccacaacctctgcctcgcggcttcaagcaattctcctgcctcagcctcccgactaggtgggattacaggcatgcgccaccacgcctggctaattttttgtctttttagtagagacggagtttcaccatgttggccaggctggtcttgaactcctgacctcacgtgatccacccacattggtctcccaaagtgctgggattacaggtatgagccaccctacctggccctctgactccttttcattgcctcctaccctacctggggcaaccatgggatgccagtttgtggtggatccttccagaaacagtttacagatgcctgagagcacagatgcttagggaacaaagtaaggactagtgtgatgcggggaaccccaaaaccgagctcagcttctgtctctactatgaaatagttgcggagatctgtcctctccgtgcttctgtctccttatctttttgttttttgagacagtgtcttgctctgttgcccaggctagagtgcagtggtgtgatctcagctcactgtaacctccacctcctgggttcaagtgattctcctgcctcagcctcccaggtagctgggactacaggtgcctgccaccatgcctggctaatttttgtatttttagtagagacggggtttcaccgtgttggccaggctggtcttgaactcctggccccaagcaatcttcccgccttggcctcccaaagtgctgggattacaggcgtgagccatcgcacccagcctccttctccttatctttaaggtgaagataatactagaatctacatcataggctagttgagagaattgactgagtgaatgcatgaaaagttcttgtagcagtgcctggtatacagttggcgctcaatgtgggtgacatttctatcctttcccagccttataaatggcagtatgttttgtacagtactctacatctggcttttttaaatgaataacatatagtattattaactagcatttattgagtgcttactgcataccaggcgttgtattaggcattcattaatttccccttaaccttgaggaaggtacttcattcccgtgtagttcaagggagttgcctcctcctcctcctcctttttttcttttttctagacagggtctactgaggtcttccacctcagcctcctgagtaggtgggactacaggtgcatgccaccacacccagctagatttaaaattttttgtagaggtggggtcttgctatgttgcccagcctggtgcttctttctttcttttatcagctgagtaatatgctagtaggaggtttcatccccttcaatggaaatttagtttgcttctaatatttggtctgttttgttttgttttgagacagagtctcgctctgtcacccagcctggagggcagtggtgcagtcttggctcactgcacctctgcctcctggattctggtgattctcctgcctcggcctcccaagtagctggtatcacaggtgcgtgccaccacacacggctaatttttgtattttattttagtagagacgggatttcaccatgttggccaggctggtctcgaactcctgacctcgtgatccacccgcctcagcctcccaaagtgctgggattataggcgtgagccaccgcgcctggcgtccagccacattctttaactcagcatctgcagaccttccagtcctatcttggccgcctgccagccatgctgacctttcgtttctgctgtgcaccacctgcccttcctctctcctttctgcctagaatgcatgcccccccactcccaatgcactttaggcctgcctggtagccactcaaacagagggctctgggctgggcgcggtggctcatgcctgtaatcccagcactttgggaggctgaggtgggtggatcacgaggtcaggagatcaagactatcctggctaacacggtgaaaccctgtctctactaaaaataaaattagccaggcatggtggcgggcacctgtagtcccagctactcgggaggctgaggctagcaaatggtgtgaatccaggaggcggagcttgcagtgagctgagatcgcgccactgcactccagcctggggacagagcgagattccgtctcataaaaaaaaaaaagagagagagggctctggggctcagctctcaggagtttctctcctgtctctgttcttgctaaccgagaagacttggagaggtctgttcatttctctgtagcctcatttttctcttctggaaaatgagtgttgctgttgcaacaagtaagtctcctagggttgctttgtgggttcaatgagataatacacgagaaaggctcaggacagcctggcaatgattatggctgttcttgtaggtactgcgccttctccttcaccctgttctcatccgatcgttcacatcttgcggccagcacccttgtctaagccaccgtcatgcctcacgtcacctggacagttccaatctccgtttcctcccagcttctgctctctgcccctttctccatgcaacagacaagggttgttcctctaatgagcatgtgaatttaggaagaataatagtaccctgccctttgtgctattgtcacatagatatgcactgtgattaggaaattactaagccaacacctgggaagcacatggaatagtgccgggcaattagaacccccagagtggccctggacctgcactgcccaatatgtgggccacgtgccacaatgcagctacctacgtttatttttcactattttattttattttactttatttattttatttttgagatggagttttgctcttgttgcccaggctggagtatagtgaagcgatctcggctcactgtagcctccacctcccgggttccagtgattcttctgcctcagcctcccagatagctgggattacaggcgcacgccaccactcctggctaatttttgtatttttagtagagacagggtttcaccatgttggtcaggctggtcttgaactgctgacctcaggtgatccacccgcctgggcctcccaaattgctggaattacaggcgtgaaccaccgtgtccagcctattttattttttagagatggagtctcgctatgttgcccaggctggagtgcagtggcacgatctcggctcactacaacctccacctcctgggttcaagtgtttttcctgcctcagtctactgagtagctggaattacaggtgcctgccatcacacccagctaatttttgtatttttagtagagacggggtttcactatgttggccagtctgggcttgaactcctgacttcaagtgatccaccttccttggcctcccaaagtgctgggattacaggcgtgagccaccacgcctggcctcaccctagatcttggaggtctttccacatcattatataaacattctttttgtctgtttttttcctttttgtagggatagggtcttgctaggttacccaggctgatcttgaactcctgggctcaagcaatccccctgcttcagcctcccaaagtgctaggattacaggcatgagccactgcacctggccaacttttccattctttttgatagctgtgtagtattctgttgcctggatgtaccatcattaatttagccagtcccctcttgctggacatgtcagttatttccagtctttggagaggtgctgcagtggcaaactttgcaagccgtttgcgtctgaagatcccggaaaccacaggacgttggaatcagcgtattttttctgcctttctgaagtcaaccagaggaaaggactgagtgagctcatggcaggaacggagctttgtcagctgatgagggagtgacaaggcgatgtcagagcagagggtggggaggctccccttacgagggtctgagtcattctgcagtcaaggattgctgggagcttgcgaaaccagcagaggcaaaatttaccttcatgcgtcacagccaaagggaacattcaaaatatttaacaatgtgctaaagtgcagaggtcccctgggcagggtctagggcctcctgctgcacctagcattaactctttagtgacatgaacatggcgacctggagtgggggtgtcccagagtaggaaacaggaacttagggtgctgggagcgggcaatagaagaagtgggtggctgagggcaggggctgtttaccagtgaaaatatttttaaaaatgttaaccttctatttggaaatattttcaaacttacggaaaaatgacaagaatggaacaggctcatatacatatacattttacctagactctccaaatttactgtatctgtctctccattatccatccatccatccatccatctgtccatcgattcatccatccatccatccatccatccatccgttatctagctattttttttttttagacagagtcttgttctgttgcccaggctggagggcagtggcgcaatcttgactcactgcaacctccacctcccaggttcaagcgattctcctgcctcagcctcccaagtagctgggactacaggcacacaccactgggcccagctaatttttttgtacttttagtggagatggggtttcactatgttggccaggctggtcttgatcttctggcctcaagtgattacaggcatgagccaccatgcccagcccattatctatgtatctatcatctatctatctatcatctatctctcaatcatatctccatgtatccattgtctgtccatcagtcatctatctgtccatcatccatgcatccactcattcacccattcgttatctatccatccgtttatttatatccatccatctttctatcacctttttttttttttgagacagagtcttgctcagtcaaggctggagtgcattggcatgatctcagcttactgcaacctccgcctcccaggttcaagtgattctcctgcctcagtctctggagtagctgggattacaggtgcgcgccaacactctggctaatttttgtatttttaatggccttttgtgactggcttctttcacttagcatcatgttttcaagattcatccacattgcagcatgtgtcagcacttccttttcatagctgagtaatattccaccacgtggctaaaccccacctttttcattcactcattagcagatactgacatcttatctttcaataatttactcatggatatgattccaccagtaaatgcccactgcccatagcctggctaaccttgggcaggtgcaatgtaagggaactagaaaaaaaaaaacaaaactatccaggcatggtggcttacatctgtaatctcagcactttgggagttcaaggcaggagggttgcttgaagttaggagtttgagaccagcctgtgcaacaaagcgagacccatctctaccaaaaaaaaaaaagaaaaaaaatacaaaaattagctgggtgtggtggtgcacaattgtagtcctagctactcaagaggctgaggcaggaggattgcttgagccagaggggctggggtgacagtgatccatgattgcaccactgcacataagcctgggtgacagatcaagaccccgtctcaaaaaaaaaaaaaaaaaaaaaatataaaacggggctgggcgtggtggttcatgcctgtaatcccagcactttgggagaccaaggccggaggattgcttgaacccaggagttcgagaccagcctgggcaatacagtgagaccctcctctttaaaaaaacattaaaaattagctgggcacagtagtatgcacctgtagtcccagctgcttgggaggctgaggcaagaggatcacttgagcctgagaagtcaaggctgcagtgagccaagatcacacccctgagctacagcctgggtgacagagtgagactcagtctcaaaaaaaaaaaaatatatatatatatatagtggttcagggatgtggatctgagctcttcaataactgacaaataataataccaatggctgccacttcttgtcctcttctctgtgtcaggcgctgtgctaggtgcttaggcatttttcatcttatttaatctttgaggtgagtgttttaaaggtagaaaaaccaggccgggtgtggtggctcatgcctgtaatcccagcattttgggaggccaaggcaggcagatcacgaggtcaggagttcgagaccagcctgaccaacatggtggaaccctgtctctactaaaaatacaaaaattagcagggtgtggtggcaggtgcctttagtcccagctactcaggaggctgaggcaggagaatcgcttgaacctgggaggcagaggttgcagtgacccgagatcgtgccactgcagtccagcgtggcgacagagtgagactccatctcaaaaaaaaaaaaaaaatgtacaaaactccatctgcaaattcaaatatttagagctgcaaatacagctctcagtatttccagaatgatttctatttcttgctgtccccttttctctgggttggtgtcaaagtggccttcaggactgggctagctccataggtcacaaaactcacctcttggaaatggtcaggggcagcctgtctggtttgcattccagcccgtatgggttcacatcctctctgagtgacctggaacagcctacttcaccttctggtgcctcgtgcttcttcatcagcgaaatgggcatttttttttctttcttttttttttttgaggtggagtctcactctgtcgcccaggctggagtgcagtgtcgctatctcagctcattgcaacttccacctcccaggttcaagtgattctcctgcctcagcctcccgagtagctgggattacaggtgcccgccaccacgcctggctaatttttgtatttttagtagagacggggtttcaccatgttggccaggctggtctcgaacccctgacctcaggtgatctgcccaccttggcttcccaaagtgcttgggttataggtgtgcaccaccacacctggcctgaaatgggcatattaacagaacctccttgtaggttgtggtcaggatggaaagagcaaattccatgccgcatgcatagtaggtgctcagtaagtactggctgctttcgggtgatcactcagtgccctgatgggtgctttactgcagtgtctggtgcctctggacacagatttcacctacaaggctttctccagtccagctgccatggactgcagcctttctttcttgggtgcatgacagcttccttcagctctgtctgggaagaagtgatcaggacctttttgttctatttttttttttttttttttttttagatggagtctcactctgttacccaggctggagtgcaatggggctgtttcggctcactgcaacctctgcctcctgggttcaagcaagtcttctgcctcagcctcccaagtagctgggattacaggcgcccactaccacgcctggctaatttttgtatttttagtagaggcggggtttcactacattggtcaggctgatcttcaactcctgacctcgtgatccacccacctcggcctcccaaagtgctggattacaggtgtgagccaccgtgcccggccagtagggctagactttgacgttaggctgctggatcgtggggaagcccaggggcttcgcaggatgggactgaggggagaggtggcagactggcaaggggtccaactagcatggaatcatttcattttttttttttttttttttttgagacagggtctcactctgtcacctaagctggagtgcaatggtatgatctcggctcactctaacctctgcctcctggggtcaggtgatcctcctacctcagcctccggagtagctgggactacaggcaagtgcaaccacgcctggctaatttttgtattttcagtagagacggggttttgccatgttgcccaggctattctcaaactcctgggctcaagcagtccgcccgcctcggcctcccaaagtgctgggatgacaggcgtgagctacggcatctgcctcaatattttaataagtggtgtgacaccctagttgactctcagccctcagcatccccatttcctagtgagaaaaagccacacaggggaaaagccacatgcctgagccaggatgccccctacccgggcacatgtctgcagactcatcctctctgctctctccgattccccttaggactccttcaattataccacccctgattatgggcactatgatgacaaggataccctggacctcaacacccctgtggataaaacttctaacacgctgcgtgttccagacatcctggccttggtcatctttgcagtcgtcttcctggtgggagtgctgggcaatgccctggtggtctgggtgacggcattcgaggccaagcggaccatcaatgccatctggttcctcaacttggcggtagccgacttcctctcctgcctggcgctgcccatcttgttcacgtccattgtacagcatcaccactggccctttggcggggccgcctgcagcatcctgccctccctcatcctgctcaacatgtacgccagcatcctgctcctggccaccatcagcgccgaccgctttctgctggtgtttaaacccatctggtgccagaacttccgaggggctggcttggcctggatcgcctgtgccgtggcttggggtttagccctgctgctgaccataccctccttcctgtaccgggtggtccgggaggagtactttccaccaaaggtgttgtgtggcgtggactacagccacgacaaacggcgggagcgagccgtggccatcgtccggctggtcctgggcttcctgtggcctctactcacgctcacgatttgttacactttcatcctgctccggacgtggagccgcagggccacgcggtccaccaagacactcaaggtggtggtggcagtggtggccagtttctttatcttctggttgccctaccaggtgacggggataatgatgtccttcctggagccatcgtcacccaccttcctgctgctgaagaagctggactccctgtgtgtctcctttgcctacatcaactgctgcatcaaccccatcatctacgtggtggccggccagggcttccagggccgactgcggaaatccctccccagcctcctccggaacgtgttgactgaagagtccgtggttagggagagcaagtcattcacgcgctccacagtggacactatggcccagaagacccaggcagtgtaggcgacagcctcatgggccactgtggcccgatgtccccttccttcccggccattctccctcttgttttcacttcacttttcgtgggatggtgttaccttagctaactaactctcctccatgttgcctgtctttcccagacttgtccctccttttccagcgggactcttctcatccttcctcatttgcaaggtgaacacttccttctagggagcaccctcccaccccccaccccccccacacacaccatctttccatcccaggcttttgaaaaacaaacagaaacccgtgtatctgggatatttccatatggcaataggtgtgaacagggaactcagaatacagacaagtagaaagattctcgcttaaaaaaaatgtatttattttatggcaagttggaaaatatgtaactggaatctcaaaagttctttgggacaaaacagaagtccatggagttatctaagctcttgtaagtgagttaatttaaaaaagaaaattaggctgagagcagtggctcacgcctgtaatcccagaactttgggaggctaaggtgggtggatcacctgaggtcaagagttccagaccaggctggccagcatggtgaaaccccgtctgtactaaaaatacaaaaaattaactgggcatggtagtgggtgcctgtaatcccagctacttgggaggctgaggtgggagaattgctcgaacttggaggtggaggttgtggtgagccatgatcgcaccactgcactctagcctgggtgaccgagggaggctctgtctcaaaagcaaagcaaaaacaaaaacaaaaacacctaaaaaacctgcagttttgtttgtactttgtttttaaattatgctttctattttgagatcattgcaaactcaacacaattgtaagtaatgatacagagggatcttgtgtacccttcacccagcctcccccaatggcaacatcttgcaaaactacaatgtagtctcataaccaggatattgacattgatacagtgaagatacaggacattctcatcaccacagggatccccaggatgcccacttccctccacccccacaccccagccgtgtccctaacccctggcaaccaggaatccactctccatttctataatgttgtcatttcaagaatgttattcaatggaatcatatagtatgtaacctgttttgagcttaaaaaaaaagtatacatgactttaatgaggaaaataaaaatgaatattgaaatgttgtgttatttctagtgaataattgactttgcagtaggtattagtcgattttcacactgctgataaagacatacccaagactgggaagaaaaaagagatttaattggacttacagttccacattgctggggaggtctcacagtcatggcaggaggcaaaggcactacttacatggtagtggcaagagaaaatgaggaagaagcaaaagtggaaactactgtgaaacccatcagatcttgtgagacttattaactatcacaagaatagcaagggaaagaccggaccccatgattcaattatctccccctgggtccctcccacaacacatgggaattctgagagatacaattcaaattgagatttgggtggggagacagccaaaccatatcacaatatttctgctttgattgtgtagtgtgcatgtgcatggattatctagaaatagcgtgcagaccagccagctgtggtggctcatgcctgtaatcccagcactttgggaggctgaggcaggcagatcacctgaggtcaggagtttgagaccagcctggccaacatggtgaaaccccgtctctactaaaaataccaaaattagctggtgtgttggtgcacacctgtaatctaagctacttaggaggctgaggcaggagaattgcttgaacccgggaggtggaggttgcagtgagccaagatcatgccactgcactccagcctagagtgagactctgtctcaaaaaaaaaaaaaaaaattaaatttagaactagtgtacagacccaatgtcgtccaacagaaatatgatgtgggccacatgtatatctttgttttctagtagccacattaaataagtaaaaagaaatagatgaaatacttaataatataatacaatcatatgttatattaagaacaatgaggcttatgtctgtaatcccagcactttgggaggccagcctgggcaacatagtgaggctccatcttcaaaaaaattagtctgagcatgggggctcatgcttgaaatcccagcactttgggaggctgagctgggcagatcacaaagccaggagttcgaaatcagcttggccaacatggcgaaaccccatctctactaaaaacacaaaaattagccggacatgatgatgcacgtctgtaatcccaggtactcaggaagctaaggcatgagaatcacttgaacccgggaggcagaggttgcagtgagctatgattgtggctcggcactctagcctgggcgacagagtgagactctctcagaaaaaaaaaaatttttttttttaacgaaaaaattagccggtgtggttggtagtgcctgtggtcccagctactcgggatgccgaggctggaggatcgcttgagcataggagtttgaggctgcagtgagttgtgatgctgcactccagcttgggtgacagagcaagaccctgtctccaaacaaacaaacaaacaaacaaaaaattgcctgagtgtctcgatggacagatgctgcagtctcttgagcttgcagaagtggctgtgagtggtgtctgtgcctgcttgagagtagacgttggtacctgggacaagatcctctctgtaacttgtgctcattagtgcagattccccaggcatcgaggtcacggggaaggacctgagccccagccgccttcagctcctgggggtgggctcccggcagctccctcctcaagaagacaacaccagcctcctggcctcctggccttctcccacctgctccggtctcttccatggctgcccctgacctggatagtttccctctgcctctttgctggacctttctccgcgtcctttgcagagttttttcctcttcgacgttggcgttcctcagctgtgtgtccacctcatttggtgcgctcactcctgcagcttcatccaatatcttcagcatctctcttccacactgggcctccccacccccttgccacagccagactgacctcagcagtctccccggaacctcttcctccccttccctcccgactccagagacaaccccgcggtgcacccagtcacccaggcctgagcctggggcccatcctggatgctacctccttcccgccccacgccctgcctggcccatgccctccatcctctcccatttggctctctgccttgccccttccctgatttcctggctgtccagtctgtttttcccagaccatccctgcctctattctgccttccttcaggggttacctcctccaggaatacctccctgacttcctcctctgcctccccaacccctacattctatctctattcccagtcatcctgtagctttcctggcttcgggagttgcaggcagtgggtattttctacccaccctgatttgggaaggagatagtgtcccaaaagctgggaggccaaagagtaggagtcggaggccaaggagtgggatccaggtagtctttccaaggcagcccccatctggtgttgacctgctctgcccagtatggaagtgggctgaaggggcagacaattgccaaatctgtagcttggagaatctgctgggtcaacaagttccgaaggggaagtggtagggaagggaagtggatgatgggcttggctgagtcaggctgtgtgccctttccggcacccacccccactccctgcagccctgggatcttattcacgcatctactctgcagaccgggatgcctctaagtcctggagccaaagccttctcctctttatctgtgccacgtgaccgtcctgaaccccacacctctcagagccaggaaggcatttctctagatgagcacagtcccatagaaatagactgtgagtggccgggcgcggtggctcacacctgtaatcccagggctttgggaggccgaggtgggtggatcacctgaggtcaggagttcgagaccagcctggccaacatggcaaaacctcgtctctactaaaaatacaaaaactagccaggtgtggtggcgcatgactgtagtctcagctactcgggaggctgaggcaggggaattacttgaacccgggaggcgggagttgcggcgagctgggatcgtaccactgcactccagcctgggtgacagagcaagactctgtctctaaataaataaataaataaaataaaataaaagagaaagtaatagactgtgagccaggaggcaggaggatcgcttgagcccaggagtttaagaccagcctgggcaacatagggagaccctgtctctacaaaaattaaaaacaaacaaatgaaataactgggtgtgcaggtatgcacctgtagtcccagttactcaggaggctcaggtgggagaattgtttgagctcaggagagactgaggctgtagtgagccaagatcgcaccactgcactccagcctcggtgacagagtaagaccctgtctcaaaaaaaaaaaaaaaaagaaatagaatgatatttatattttcccacaggcaagcaacagacaaaaagaaacaaaaagaatcaggtaaaattaattttgataatacattttatttaacacaatatatttaaggagtatcattttaacatgtgttcaatagaaacaaattcttgagacttcatattctgttttttttggtactgtgttttcaaaatctggtgtgtattttccactcacagcacttcttatctcggacccgaagacatttcaagtggtccgtagtctcttgtggctggtggctgcagtgttggactgctcagggccagacttccttgactaatgtatagagcatctacagaatttgaacatctaactgttggagccgtgcttctaaccctccgaggttctggtgtgatattctaggatcctgtgattcaaatagcctgtaactcacattgtaggatctattaggttcaatagtctatgattccaacattttaagagtctgtgattccaatattctagtctccagagtctttgattgattgattgattttgagacagagtcttgctctgtcacccaggctgtagtgcagtggtgcgatcttggcttactgcaacctctgcctcccaggttcaagcgattctcctgcctcagccatccgagtagctgggattacaggcacctgccatcatgcctggctaatttttttttttttttttgagacagagttttgctcttgtcacccagctggagtgcaatggcacagtctcggctcactgcaacctccgcctcccgggttcaagtgattctcctgcctcagcctcctgagtagctgggattacaggtgaccgccccacgcccagctaattttgtatttttagtagatacggggtttcaccatgttggccaggatggtctcaatctcttgacctcgtgatccacccacctcggccttccaaagtgttgagattacaggcgtgagccaccgtgcccggccgtgactgtgttttatgactctcatatatgttaagacattctctcctatgcatcaaatatcacataaatattgtttcatattatattgttcaaaagagaaaaagtctatggtcctccccatcttagtcactcatccttttaagccctgtaattccattagattgaaccctatgaaattgccaagattcagtccttttggggtgggatgtgtgtgtaacaatttatttatttgttgtttttgaaaaattgtggtgccatggcacagtggctcatgtctgtaatcccaacactttgagaggctgaggtgggaggatcacgtgagcccaagaattcgagaccagcctgggcaacatagtgataccctatctctacaaaaaaaaaaaaaaaaaaattagccaggtgtggtgacatgtacctgtagtcccaggtacttgggaggctgaggcaggaggatcgcttgagcccaggaggcagaggttgcagtgagctgagatcacaccactgcattccagcctgggtgacagagtgatccgaggtgggtggatcactaggtcaagagatcaagaccatcctggccaacatggtgaaaccccgagtctaccaaaaatacaaaattagctgggcgtagtggcacgtgcctgtagtcccagctactcaggaggctgaggcaggagaatcgcttggacacagcaggcaggtggaggttgcaatgagccaagatggagccactgccctccagcctggtgacagagcaagactctgtctaaaaacaaaaacaaaaacaaaaacaaaaaaaacgagtaaaagaaaaattgtagtaaaatgcacataacataaaatttaccattagtggcatttcatgcatttgcagtgttgtgcatccatcaccgctatcttgttccagaacattctcatcaccccaaaaggaaacccagtacccattaagcagtcactccccccccattctttgccttcaacccctggcgaccacccaggtacattctaactctacagatttgctgaaatttgaccttgtggcctgacatggtatctcatgtctgtaatctcagcacttttggaggccaaagtgggaggactgtttgaggccaggagttcaagaccagcctgggcaacatagtgagacccctgtctcttttggaaaaaaaaaaaaaaagaaagaaaaataaaaagaaattcaacctttttgacctagaaaaatgaaaatttctttttttttttttttttttgagacggagtcttgctctgtcgccccggctggagtgcagtggcacgatctcggctcgccgcaagctccgcctcccaggttcacgccattctcccgcctcagcctcctgagtagctgggactgcaggtgcccgccaccatgcccagctaattttctgtatttttagtggagacggggtttcaccatgttagccaggatggtctcgatctcctgacctcgtaatccacctgcctcggcctcccaaagtgctgggattacaggcgtgagccaccgcgcccggctgaaaaatgataatttcatatggattgacttaagaaccttttaggatggttgggtgtggtggctaatacctgtaatcccagcactttcggaggctgaagcaggtggattatttgaggtcaggagtttgagacaaccctggccaacatggtgaaaccccgtttctactaaaaatacaaaaattagctgggtatggtggcaggtgcctgtaatcccagctacttaggaggctgaggctggagaattgcttgaacctgggaggcagagggtatagtgagccaagatcacaccactgcactcgagcctgggcgacatagcaagactctgtctcaaaaaaaaaaaaaaagaaaagagaaagaaaaagaaaaaaagaagcaaaaaaaatccttgtaggatgttctcattcaaaatttctcccaggaggaaatggctggtgagttgagggggtagtgctcggcttttcacagggtggctgagagagaatcccctgcacgtacacactggcccccctcctgccttccgaggcctgtagagaccctgttcttggcccatagcaacccccagacctccaagtgacagccctcagctccagggacaccagaaaatctttgccttcccaaatctaagatttttgttttgtttttgtttttttggaaacggagtcctgctctgtcgcccaggctggagtgcagtggtgccatcttggctcattgcaacctccacctcccaggttcaaacaattctcctgcctcagcctcctgagtagctgggattacaggtactccccaaccaagcctgactaatttttttttttttttgtattttcagtagagacagggtttcacaatgttggccaggtgggtctggaactcctgacctcaaatgatccactggccttggcttcccaaagtgctgggattacagaagtaagccactgcgcccagcctcaaatctaagacacttaaaaatttgtttttttggttttttttttttgagacgcagtttcgctcttgttgcccaggctacagtgcaatggcgcgatctcggctcaccgcaacctccgcctcccaggttcaagcgattctcctgccttagcctcccgagtagctgggattacaggcgcccaccacctaggctaattttgtatttttagtagagacggggtttctccatgttggtcaggctggtcttgaactcccgacctcaggtgatccacccaccttggcatcccaaagtgctgggattacaggcatgagccaccgtgactggcaatttttttaaaattttaaattattttttcgagtcagggcctttctctgttgctcaggctggagtgcagtggtgcattcacagttcactgcagccttgagctcttgggctcaagcgatcctccctcctcagcctccacctcccacttcagcctccagagtagcaggactacaggctcgctccaacacgcctggctaattaaaacaaattctaggggggcagatgctgtggctagcacacgtaatcacggcactttggaaggccagtgtgggaggattgctcgagcctaggaattggaggcaagactaggcaacagagacagaccccatctctacaaaaagttttttaaaaaattagctgggtgtggtggcttgagcctgtagtcccaactactttgggggctgaggtgggaggattgcttgaacccaggaggtcaaggctgcggtgagctgtgatcacaccactgcactccaatctgggtgaagagtcagaccctggattaaaaaaatatatatttttcccccagagacagcatctcactatgttggtcaggctggtctcaaaatcctagcctcaagcagtcctcacacctcggcctcctaaagtgtggagattagaggtgtaagccatcctgcctggctgcaattctaagaaatgtatgttgaaaaacttagtggatgtatcaggagtttatcaagatgaagcatctgaggaacagaccatcgttaacttttcaagttaaagcaagtttgagctcccgggcgtggtggctcatgcctgtaatcccagcactttgggaggccgaggtgggcagatcatgaggtcaggagatcgagaccatcctggctaacacggcgaaaccccgtctctactaaaaatacaaaaaaaattagccgggcgtggtggcgggtgcctgtagtcccagctactcgggggggctgaggcaggagaatggtgtgaacccgggaggtggagcttgcagtgagccgagatcgcgccactgcactccagcctgggcaacagagacagactccgtctcaaaaaaaaaaaaaaaaagaaagaaaaaaagaaagtttgagctgataaagggaaggttccacctcggtttctttcctcttaatctcttcttcaggccagggcagattcccacaggagattggggctggcaggatgtccctcctctcccaaggagggggcttcccgggacagaagaggaggggaggggacttgggggatgttttcctctctgagggtccggggtgagggtcagccaacgcagggtcacctagtcagggaaacagagtggaggaagccctgggtcaaacagtgagtcccagctccttgtctcacgaacaacttcctctagcaaagtgatttcattctctaaaacaataacaaaagaagtgtgtaaatatatcccttgaatccctaaagcacgcacaaaaaaagcacaaacagaaagaactgctgaataaagaggttccaaagttggggttggagccacttcctcttgctaagcctgcgtggtatgtgtactttaagaattcacgttacagtcttgttgctgttgcgtgagcctagcgtatactatgtgccaggcactgctccggtttttttgtttttgtttttttgagacagagtctcactctgtcgcccaggctggagtgcaatggtgagatctcggctcactggaacctccgcctcctcggttcaaatgattctcctgcctcggcctcccgagtagctgggattacaggcacgcaccaccacgcccagctaatttttgtatttttagtagagatggtgttctgccatgttggccaggctggtcttgaacacttgacttcaagtgatccacctgcctcggcctcccaaagtgctgggattacagatgtgagctaccgcgcccagccagttctgtgcgttttaaatgtatccaacgctcatagcaaacatccactgcacagatgaggaagttgaggttcagaggggctgaggccctgaactttgatgagggtgtgtcgacctggaatatgaatctcatcattctggcccttgagttcttgttctcagccactgtgatatgctggaagaggttaagaattgctatcacggctgtggctcacttctgtaatcccagccctttgggaggtcgaggtgtgaggatggcttgaggctgggcaacacagcaaggccgcacctctacagaaaattttaaaaaattagccaggtatgttggtgcatgcctgtagtcctagctactcaggaggctgaggtgggaggatcacttgagcctaggagtttgaggctgcagtgaggcataatgttttcactgcacgccagtctgagcgacagagcaagactccatctctaaaaaaagtaaagcatcgctatggccaacaacatcttcccattctacagatggaaaattgaggcccaagaaaggagttgtttgtgctttttctaccactgaggcgttgggccctgcgctcagctgctgtggtctttttgtggagaatgtgaccccaggctgtcttcctcagagccgaggaggagggagggatgtttgtctgtcctgaggctgcagaagggaggggttgaacacagttagaggcctggaggtggctgggggcagctggcatgttgtgggcaaacagaatccaggccaagacctctaaggcgttaaagagcaaaccgcatgcaggtctggcttccaggaaggtgggacttcgagactagggttggggacttgggatcagccctccacccaaccgagccctctcctgccctgccagccaccccgtaattttgggttctgtgagtcacgggaagaagacaggacaaacacaccctgagagcgagacaaggccactcctattttgtactgcttataaagattcactgggactggtgaggtggcagtgctcagcagcatccgacaggagccctggcaaacaggacggatttccaggactctaccagctgccagacacggcagggagagaccccagacctcctgggtcctggctgtgggcccggattgggctcccaagtggcgtttgactcacgtggggacactcttggaagagacggtaaggatggaggctacaagggcgggaaggagggagagagagattgcatgatcttggcttctcggaatcattactttcagaatctgggaagcagaactagagtttgagaagtgcagtcttattacagccacactggaacgcacgtcacagtcctgggctcttgaattaacttgggcagcccagcagcaaagctcttgtcaaaggatctaagcattttttttctttctctttttggagacaggttttcattcttgttgcccaggctggagtgcaatggtgccatcttggctcaccgcaacctccacctcccaggttcaagggattctcttgtctcagctgggattacaagcgcatgccaccatgcctggctaattttgtatttttagtagagatggggtttctccatgttggtcaggctggtctcgaactcccgacctcaggtgatctgtccgccttggcctcccaaagtgctgggattacaggcgtgagccactgtgccctgcccaaatggtttttcacacacagatgtatgggaaacagcctctctcaaacctgcaggaattcctgcagctttcggcagatccaccaaactgtagcatgtgtagcaagcaagccctttaactcagcgattccaattcttttctctttctttccttttctctctttctttcttttgacagggtctcactctgtctcccaggctggagtgcagtggtgcgatcttggctcactgcaacctccgcctcccaggttcaagtgattctcctgccccagcctgctgagtagctgggattacaggtgcacgccaccacacctagctaatttttgtatttttagtagagatggggtttcaccatgttggccaggctggtctccaacttttgacctcaggtgatccacctaccttggcctcccaaagtgctgggattacaggcgtgaatcaccgtgcctggccccctcaatgttctatcacaaaatctgtccacattcttgtgtggtgtttgttcattctcatcgtgtagaatattccacagggtgaacaccccatgatgtgtttatccattctgctgtgggtggctatttggacggtttctcatcttgggctgctgtgaacattctggcacatgtattctggtgagcatatgtgttcttttgcggaaaggaggctgattgctgggtcgtgagggaggaatcctagaagatggatgttcaggaataaagaatgttcagactccttttttttttttttttttttgagatggagtcttgctcaggctggagtgcagtggtgcgatctcggctcactgcaacctccgcctcctgggttcacgccattctcctgcctcagcctcctgagtagctgggactacaggcgcccgccaccgcgcccagctaattttttgtattttttagtagagatggggtttcaccatgttagccaggatggtctcgatctcctgacctcgtgatccacctgcctgggcctcccaaagtgccggggattacaggtgtgagccactgcgcccggccagccttctttgattctgctccagggttttccagagcagagaacccagcaagactggatgcacagacaggcgtgcaccaagaggcacatgtgagggtgcttgcaatcacaacaaaagaaacctaagtgaccacttagtctctctgtgcctcagtttactcttttatcctttcacttaccaaatatcgaccatgcctgtgctgtgtgccaggttctgtcccagatgccagggacacagcggcacccgaggctggaaggagctgatgttgtgggatatgaggatgataatattgacctcaagggtttgtgttgagggttatatcttgtaggtcataggtgctcaataaaagccatctattattttaattattatgaaataataagaagggtacctatgatttaaaagctagatataagtacagacgctctttgacttacaatggggtcccatctctatcaacccatcgtaaggctgggcacagtggctcacgcctgtaatggcagcacttttgggaggctgaggtgggaggatttcttgagcccaggagtttgagatcagcctgggcaacagagtaagggctgtccatacagaaaaaaaaaaaaaaattagctgggcatgatggcgtgcacccgtagtcccagctactccagaggctgaggcaggaggatcagttgagcctaggaggtagaggctgtggtgagccgaggttgaaccactgaactcagcttgggtgactgaacaagacgaaaacacaaaacaaaagcccccaacattttcaacataagttgaaaatattgtaaatcaaattggatttaatacacctagcttactgaacatcatagcctactttttttttttgagacagggtctcactctgttgtccaggctggagtgcagtggcgcgatcttggctcactgcagccttgacctcacgggcgtagcctacctcaaatgtgttcagaacatttacattacccaacagcaagacaaaatcatctaagccaaatccaatttttttttttttgagatggagtctcactctgtcacccatgctggagtgcagtggtgtgatctcagctgactgcaacctccacctcccagcttcaagggattctcctgcctcggccttctgagtagctgagattacaggcactcgcccccacgcccagctaatttttttttttttttaaatctttagcagagatgagattttatcatgttggccaggctggtctcaaactcctgacctcaagtgatccgtctgcctaggactcccaaagcgttgggattacaggtgtgagcttctgcacctggccctgtttctcattattctccttaccattgttattgaatggcctttagttaataagcaccacttgggcagacagtggactgtttttgatgctttgaggacgaatggggttgatatctgtacagatagacaggaaaacagatatcgggcacgttaagtggaaaagatgaagaaatggaacaacgtatgttgaaagctcccatttctggttaagacgttacaaaggaaatgccatctacgataccattgctttgggcttacagctgggcaaattatatgcacagaaagtttcctggattgggctgggcatgttgactcacgcctgtaatcccagcactttgggaggccgaggtgggcggatcatgaggtcaggagattgagaccatcctggctaacacggtgaaaccctgtctctactaaaaatacaaaaaattagccggaagtggtagcgggcgcctgtagtcccagctactcgggagactgaggcaggagaatcatgcgaacccgggaggtggagcttgcagtgagccgagatcgcaccactgcactccagcctgggcgacagagtgatactccgtctcaaaaaaaaaaaaaaaaaaaaaaaaaaaaaaagaaagttttcgttttctggattgtaatcaacaagggccaggaagggtggagtctttgcggggtgagaggatgcgtgtggacagtgataacagcagctagcctacgtatgacacccactgaaaaccagcgctatacactcagctctacccttctaacttgttgaattcttacaacaccccctaaggcaggaatattattattcccattttactgaggcacagatagtttaggtgacttgcccaaggccacacagctggtaggaatttgagggtttttgttgttgttgtttgtttgtttgttttttatgatgcagtctcgctgttgtcgcccaggctggagtgcagtggcatgatcttggctcactgcaacctctgcctcccgggttccagcgattctcttgcctcagtctcccgagtagctggaattacaggagcccacaaccatgcctggctgatttttgtatttttagtagagaccaggtttcaccatgttgctcaggctggtcttgaactcctggcctcaagtgatccgcccacctcggcctcccaaagtgctgggattacaggtgtgagccactgtgcccggctagggggggttcagtttttaaatgctgtactctttctttctttctttccttccttccttccttccttccttccttccttccttccttccttccttccttcctttctttctttctttctttctttttctttctttcttgggacagggtctcactctgttgctcaggctggagtgcagtggcgcgatcatggctaactgcagcctcaaactcctgggctcatgtgatcttccaccccagtcttagaaaaggttgggattgcaggcacgaaccactatgcctggctaatttttaaattttttgtagagacagagggtctcactgtgttgcctaggctggtcttgaactcttggcctcaagcgatccttcctcctcaactcagcctcccaatgtactgggattacaggtgtgagccactgcacctggctaaattctgcacaccttttactctagggataaaaataatacgaaagtggaatgccagactccgaatacacacaccaagtggcctggactcttcactgctacctggcatgggggaggggagtgccccaacttcctctctgtccttcctgttgcctcaacaccagctggagtgctgagcagtgccagccaacccataatagtcagcagagagcctcagggccaggtcactctgacattgtgggggtgggggggtggggactcctgcctgggtcctgtgctacccacagctttgtctaccggagcctgtgtgccacgtgctggacaaatcttaactcctcaaggactcccaaaaccagaggtaggttcacctcaatgactcttgtttccccgatgaggaaataggcacagccagctgcaactgacacccacagtcatggaggccggggctgctcaggaccacttgctgtgctgcctgccagctctccagagcccaagatttggagatggtaatattctagggcatggggttctgcagcggggactaacacactttgaaatttacctacttagggctgggcgcggtggctcatgcctgcaatcccagcactttgggaggctgaggtgggcggatcacaaggtcaggagttcgagaccagcctggccaatatgatgaaaccccgtatctactaaaaatacacaaattagttgggcatggtggcgggtgcctgtagtcccagctactcaggaggctgaggcgggagaattgcttgaaccctggaggcggaggttgcagtgagccgagattgcgtcactgcactccagcctggatgacagagcgagactctgtctcaaaaaaaaaaattttacctacttagctgagtgatcttaggtaaattacttaacttctctgtgccttatctgtagaataaatataacaatagtgtcaaattcagacagttattataaggtttcagtgaggtcaggcacggtggctcatgcctgtaatcctagcactttgggaggccgtggcaggcagaccacttgaggtcaggaattccaaaccagcctgaccaacatggtgaaaccccgtctctactaaaaatacaaaaaattagccccgggcatggtggtgcacgcctgtaatcccagctactcgggaggcttgtggcaggagtaatgcttgaacccaggaagcagaggttgcagtgagccaaaatagcgccactgcactccagcctgggtagcagagtgagactccgtctcaaaaaaaaaaataaataaaataaaataaaacaaggtttcagtgatacagtgtttaaagctgcgtggtggccactgcctgtagtcccagctactcagggggcagaggtgggaggatcacttgagcacagagtttgaggctgcagtgagccgtgattgcaccactgcactccagcgttggcaagatggcgagaccctgtctctaaaaaaaatatatatatataaatttgccaggtgtggtggtgcacacctgtagtcccacgtactcaggaggctgaggtgggaggaccacttgagcccaggagttcgaggctgcagtgagccaagatagtgccattgcattccagcctgagtgacagagcaatatctgtccctaaaaaaaaaaaaaaagttgacacaaaacacaaaatgttcaagaaacagtggcttccaataataataattttattattattattattgtcaggcacagtggcaatcatgcctgtaatcccagcagtttgagaggctgagacaaggcaggttgcttaagccccagaattcaagaccagcatgggcaacatggtgaaaccagatgacctccaaaataataataataataataataataataataattaatcaggcatgatggtgtgcacctgtagtcctagctacttgggagggtgaggtggagggttgcttgagcccaggagatggaggctgcagtgagctgggaaagtgccgctgcagtccagtctgggctacagagccagaccctgtctcaaaaaatagtaataatatagtaataatattattgtggcccgacatggtggctcacgcctgtaatcccagcactttgggaggctgaggcaggtggatcacctgaggtcaggagttcgacaccagcctggctaacatggtgaaaccccatctctactaaaaatacaaaaattagccaggtgtggtggcatgtacctgtaatctcagctacttgggaggctgaggcaggagaattgcttgaacccaggaggcggaggttgcagtgagccgagatcatgccaccacactccagcctgggcaacagagcaaaactctgtctcaaaaaaaataaattattgctatgatagattatgtcgcttccttgctcagcaccctcctatagcacctgtctcatttggaataaatgatgatgtccttgcgttgcccacgtggccctacatgccgtggcccctgataactgtttttcatttgttttgttttgttttgtttttttctttttttgagatggagtcttgctctgttgcccaggctggagtgcactggcatgatctcagctcacagcaacctccgcctccctggttcaagtgatccctcctgcctcagcctcctgagtagctgggattacaggcgtccaccatcactccaggttatttttgtgtttttaggagagatggggtttcaccatgttggccaggctggtctcaaactcctgacctcaggtgatccacccaccttggcctcccaaattcccgtgattactggcatgagccactgtgcccggcccctgatgactctgctattgcctctcaccctctccctctggcagattccactccagccacactgggctccttgctgttcttggacatgaccgtcatgttcccacctcagggcctttgcactggctgttctcgatgcctgaaacactcttcccccagatctcgatgcatctctcccactgttccttcagatttttatgcaaatgtcaccttctcaagaagccttccctgaccatgcctgtacaactccaacatagccagcttccctgtgtgatatttttcccatagtatttattatcttctaaaatactgtggattttggattttgctcatttctttctttcttttcctatttttttttattttttgagacagagtctctctctgtcatcctggctggagtgcaggggtatgatcaagctcactcaatctcctgggctcaaatgattctcccacttcagccttttcggcagctaggatcacaggcacgcatgaccatgcctggctatgttttaaaaaattttcgtagagatggggtctccctatgttgcccaggctggtctagaactcctgacctcaagtgatcttcccaccttggcctctcaaatcgttgggattacaggcctgaaccaccgtgcccagccccaatattccaatgtactagggttctggcattgtaatattctagaattccaagatgccacttctaacaacactaagttctagaattccaattttttttttttttttttgagatggagtctcactctgtctcccaggctggagtgcagtggtgtgagctcagctcactgccacctccaccttctgggttcaagaaattctcagcctcccaagtagctgggattacaggtgcccgccaccacacccagctaatttttgtatttttagtagagacggtgtttcaccatgttggcctgtcttgaattcctgacctcaagtgatccacctgtcttggcctcccaaagtgttaagattacaggtgtgagccaccacacccggcctagaattccaatattctaaagcactggagtccttatgacgcaatattccagtttgcaaggtgctggtgggccgggctgatggacaccctagatctccagggccatggagtttcctcctctgagttttcatcgtctttctctcctgcccagacaccaggagcctgaatggggaacgattctgtcagctacgagtatggggattacagcgacctctcggaccgccctgtggactgcctggatggcgcctgcctggccatcgacccgctgcgcgtggccccgctcccactgtatgccgccatcttcctggtgggggtgccgggcaatgccatggtggcctgggtggctgggaaggtggcccgccggagggtgggtgccacctggttgctccacctggccgtggcggatttgctgtgctgtttgtctctgcccatcctggcagtgcccattgcccgtggaggccactggccgtatggtgcagtgggctgtcgggcgctgccctccatcatcctgctgaccatgtatgccagcgtcctgctcctggcagctctcagtgccgacctctgcttcctggctctcgggcctgcctggtggtctacggttcagcgggcgtgcggggtgcaggtggcctgtggggcagcctggacactggccttgctgctcaccgtgccctccgccatctaccgccggctgcaccaggagcacttcccagcccggctgcagtgtgtggtggactacggcggctcctccagcaccgagaatgcggtgactgccatccggtttctttttggcttcctggggcccctggtggccgtggccagctgccacagtgccctcctgtgctgggcagcccgacgctgccggccgctgggcacagccattgtggtggggttttttgtctgctgggcaccctaccacctgctggggctggtgctcactgtggcggccccgaactccgcactcctggccagggccctgcgggctgaacccctcatcgtgggccttgccctcgctcacagctgcctcaatcccatgctcttcctgtattttgggagggctcaactccgccggtcactgccagctgcctgtcactgggccctgagggagtcccagggccaggacgaaagtgtggacagcaagaaatccaccagccatgacctggtctcggagatggaggtgtaggctggagagacattgtgggtgtgtatcttcttatctcatttcacaagactggcttcaggcatagctggatccaggagctcaatgatgtcttcattttattccttccttcattcaacagatatccatcatgcacttgctatgtgcaaggcctttttaggcactagagatatagcagtgaccaaaacagacacaaatcctgccctcagggagctgatattcttctagtggaggaagacagactataaacaaagatatatagggccatttgcggtggctcacgcctgtaattccagggctttgggaggctgaggcaggtagatcacttgaggtcaggacttcaagaccagcctagccaatatggtgaaaccctgtctctactaaaaatacaaaaattagccgggcatggtggcgcatgcctgtagtcccagctacttgggaggctgaggcagaagaatcgttttgaacccgggaggcagaggtgacagtgagccaagattgagcccctgcactccagcctgggcgacagagcgagactccgtctcaaaaaataaataaataaaagattctatttatttatttatttttttgagatggagtctcgctctgtcgcccaggctggagtgcagtggcacaatctcggctcactgcaagctccgcctcctgagttcacgccattctcctgcctcagcctcctgagtagctgggactacaggcgcccgccaccatgcccagctaatttttgtatttttagtagagaaggggtttcaccttgttagccaggatggtcttgatctcctgacctggtgatccacccgcctcagcctcccaaagtgctgggattacaggcgtgagccaccgcacccggccaaaagattttaataggatccctctggttgctggtggaggtgagagtatggtgtaggggcagtgaagatcccagagaggaggctactgtaatggtccaagcaggaggtgatagcgatttggatcagggtaacagagctgaggtggtgagaggctgacaggtcatgcatctattttgaaggaaaggccaagtccaggctccttagctcggcattcaaggcttctctccaccactggacacacttactctctagcttctcagaccctgtagcaatcagaatcatgacccccggtgatgtccacatcttaatcccctgaacctgtgaagaggtgaccttccatggcaaaagggactttgcaggtgagattaagtaaaggatcttgagaaggggtggttatcctggattgtctgggtgggctcaatggagtcacgagggtccttttaagagggaggcaggagggtcagggtcagtcacaggaggtgacaacggaagcagatgtcatagtgacgtgaggaggtgccaagaaatgcaggcagcttccagaagctgaaacagacaaggaaacagattctctctgaagctcccagaaggaacacagacctcctgacacttttagacctctgatccgcagacctttaagaaaatacatttgtattgttttaagtcactatgtttggggtgatttgttatagcagccgtgggaagctaatacacacccttcgggctatattcacgcttctgcatctttcctgaagctgtgccactggctggaatgtccttctgatctatgttgtgcagttcaacaatcaagagccatctgtggctattcaaattcgaatcaattggccaggcctggtggctcctgcctataatctcagcactttgggaggccgaggtgggaggattgcatgagcccaggagtttgagaccagcctgggcgacatagcaagaccccatctctacaaaaaatacaaaaattagccagacgtggtggggcgtgcctgtagttccagctactgaggagggagttgcttgaatccttctgcttcaatcctccttaaagcaggtagattgcttgagcccgggaagtggagtttgcagtgagcttagatcacaccgctgcactccagcctggatgtcagaatgagactccatctcaaaaaaaaaaagaaagaaagaataaattttcatttcaaatttagttcctcgggcacactggccatagttcaagtgctcagtagccacatatggctggtgactgccatattcgacagcacagctatagaacattgccatcataacagagatttctgttacaaaatgctgttctagaatttacttttgaactctacctgctcagatcttttaaattacatggtaggccaggcatggtggctcacgcctgtgatcccagcactttcggaggcccagtcgggaggatcccttgagcccagaagctggagacctgcctgggcaacagagcaagaccccatctctacaaaaataaaaaaaagaaaattagcctggtttggtggcacatgcctgtagtgccagctactagggagactgaagtgggaggattgcttcagcctgggaggttgaggctgcagtgagccgtgatctcatcactgcactctagcctaggtgacggagcgggaccctgccgctaaataaataaataaataaataacatagtagtgatacctgtgtctgcggtcattactccagaacagcacttcacatatagtttctcctttaaggtcattctcacaacagcccagggagatagggtggcatgcttcattttataagctgaggtcctgggaggggaggtcatttacccaagatcacacagcaagaacaccagacagctggaatttgatcccagttttgactccaatgctcttgctcttcatcatcaataatttccttcaaggcgtccctcaaatgtcacttcctccaggaagccctccctgatttatgctccttccagaaagaatgggctcttcctttctctgagtctctggaacacaaggtcccagctaaactgtaaattccccaagggtaacaactggactaattttttttaatttaatttaattttatttttttgagatgaagtcttgctctgtcacccaggctggattgtagtggcacgatctcggctgaccgcaacctccacctcccgggttcaagcgattcttatgcctcagcctcccgagtagctgggattacaggcgctgccaccacacttggctaatttttgtatttttagtagagacagggtttcaccatgttggccaggctggtctcgaactcctgacctcaggtgatccacccaccttggcctcccaaagtgctgggaatacaggcatgagccaccgttcccggccttatccttgacttagaatacctaacctcctgggaatgcagcccataggtctcagccttatttcacccagctcctgttcaagatggagtcactctggttcacatgcctctgacatttccccgctcccttttataagagaacctttaatcctaagggttgtagagggaggaagatacaacttctgtgacttcttcaggctggacaggggtgacgatatacctgcctaactcttaggatctattggattcagggtagacaggagctcagtcagaaagcactggtatcactttttttttttttttttttttttgagacggagtttcactcttgttgcccaggctggagtgcaatggcacgatctcagctcaccacagcctccgcctcccaggttcaagcgattctcctgcctcagcctccccagtagctgggactacaggcgtgtgccaccaaacccagctaatgtttttttttttttatttttagtagagacggggtttctccatgttggccaggctggtctcgaactcccgacctcaggtgatccacccgcctcggcctcccaaagtgctgggattacagacatgagccaccacgcccggcctgatattttattacttagtattttactctgaattatcatgcgtgaattaagaccaaggctgtcttgtaaaataaaatttgttgtggaacaatttatacagctcctttgaggtaggaggcaggactcaactctggagatggggctcggctcgaatattggaccaaattgaggaccagctaaaacagggaggaggctgaagcaacttattatttttatttatttttattttttggagaaggagtcttgctctgttacccaggctggagtgcagtgacacgatctcggctcactgcaacctccaccttccggattcaagtgattctcctgccgcagcctcccgagtagctgggactacaggcgcatgccaccatgcccagctaatatttttgtattttttagtagagatggggtttcgccatattagccaggctggtcttgaactcctgactcaggtgatctgcccacctcggcctcccaaagtgctgggattacaggtgtgggccaccacgcctggcccgaagcaactttctatgacacgcctaccagtgtgccatgtcagtttgccattgccatggcaacacacccaggagttactgccccttcccatggcaatgaccccatgacccagaagttactgccccttccctagatatttctgcataaactgccccttaatctacatgtaattaaaaataggtataggctatttttatacctatataaataggtataggctaaaaataggtataggctgggcgtggtggctcatgtctgtaatcccagtactttgggaggccaatgcaggtggatcacctgaggtcaggagatcaagaccatcctggctaacatagtgaaaccctgtctctactaaaaatacaaaaaattagccaggcgtgttggcgggagcctgtagactcagctactcgggaggttgaggcaggagaatggcgtgaacccaggaggcggagcttgcagtgagccgagatcacaccactgcactccagcctgggtgacagagcaagactccgtctaaaaaaaaaaaatagtaagaaagaaggaaagacacaaagacagaaagaaggaaggaaagaaagcaagctgttttcccctgccttgcccctgctcacctttgaattcttttctgggcaaagccaagaaccctcgtgggctaaaaccccgctttggggcttaaagtttgcaaaatcctcccattaatctattgggaccagttgccacttaggagcattctttgataacttttacaaaacatcttttgtggtttttgaaatgttttcattttgtagatcattagcccttcttttttgaactggaatacatttcacgggaattttcaaatttaagtctgtgcaatgttacataaaatacctttgattattaaaagccatctgttttgctataacttcccttttttgttctaaagtttgtctatttctgctatttgtttttttaccatagaaatattgatttccttaagttttcaaagaaccaagttattaataatttctctaagaactagtctcaagcttgctatacaatcctatggttgatagactgtggctttcttgttgatttccatttgttgttcatttcctccaattttccttttttaaaaattataattattgtttggattatttatttatttatttatttgtttgtttgtttatttgagacagagtttctccttgtcgcccaggctagagtgcaatgatgcgatgttggctcactgcaacctccacctcctgggttcaagcgattctcttgcctcagcctcccgagaagctgggattacaggtgtccgtcatcatgcctggctaattttttatatttttagtagagacgggatttcatcatgttggcttagctggtctcgaactcctgacctcaggtaatccacctgcctcggcctcccaaagtgctgggattacaggcgtgagccaccgcacctggccttgtttggaaattttaagcagaatgcttagtccatttattcttcttcttttgataataatgtatgaattggcttctctatctctaagttgttttccagaggcttgataattatatccaacgttccacttgacatccccagttgatgtccaatgcataactcaaacaatatgctgaaaacagatcttcggattttctctctagcctctctcccacgtcttcctgatggtagtagatggtgactccatatttccaaatgctcaggccaaaaactttagagtccttcttttttttagacatagaacttttttctggccaggcacggtggctcatgcctgtaatcccagcactttgggaggccgaggtgggcggatcacgaggtcaggagatcgagaccatcctggctaacacagtgaaaccccgtctctactaaaaatacaaaaaattagccgggcgtggtggcgggcgcctgtagtcccagctatgcgggaggctcaggcaggagaatggcgggaacctgggaggcggagcctgcagtgggccgagatcgcgccaccgcactccaacctgggcgacagcgagactccgtctcagaaaaaaaaaacaacaacacttttttctttttttgagacagtctggctctgtcacccaggctggagtgcggtggtaccatcatggctcactgcagcctcagtctctcagcctcctaggttcaatcgatcctcccacctcagcctcttgagtagctgggactacaggcacacactaccatatccgactaacttttgtatttttttgtagaaacaggggttggccatattgcccaggctggtgtggaacgcctgacctcaggtgatccacctaccccggcctctcaaactgttgggattacaggcgtgagccgccgtgcccagctgtttcttctttcagttaataaaagagagggtgcattgctggctaatgagattgtttctatacttgggggtcttcctgaatgtgtgtgattgagtttattgcagagaaaggtaacagaaaatggggttgtagaaagaaaagaggtagaggctgagtgagatgccccacatctgtaatctcagtgctttgggaggccaaggcgggcggatcacttgagatcaggagctggagaccagcctggcccaaatcgtgaaacctcgtctctactaaaaatacaaaaatcagccaggtgtagtggtgtgcgcctgtaatcccagctactcgagaggctgaggcaggagaatggtttgaacttgggaggcggagattgcaatgaggtgagataacgccactgcactctagcctgggagacagtgagactatgtctcaaaagaaaaaaaaaagttcctgggccccagaccagctctctctttgggttaaaaccccggcgtcccggagctgaggcgcacgtggctatgcttggggaggagagggcggggccggggaggaggcgcttgcaagtctgtaccgcaatgcctctactggcctctagagggcgcaatcactcgaggctccgccccaagcgaggcggggcggaagcgtgctgtgcacaggcgcaagatgggtcttgggcagcccagagcttccgattggctcttctgtggtggcggggcggggtcagaacgagatggctgtgtgcgcaggcgcaagactagcgctcttgggaccggaagttaaggcgttcgcggcgtgtggtaagtgaggggggcgggacgggtgtaccgggttgtggcggcgatggctgtcggagttgggccgcttgggggtagtttggggtgcgagtccaggggcgagggaagtctcgagatgaggagaaatgtaggaggcagccgaagggccggcaaacgcggacagagatggcacctgagcgtccctgggagaacctgggcgacaggccagagaccgaaagaaatggaggcacgaaaagaagcttcgagaaactgagggactgaaagacgagggtgttgggagaggagggaagctgaaaactagagagcgtgggcgagagtgccgatgggttccagcgagagtcttagagcccacgaggccgagaggcgtggtcgcccatgaacttggggagtggagggaaaagtcggaaactgatcgtggacactagaaacagaaaaaatggaatttagatggagaaacgagacactgaatcacgggggagaccgagagatacggaaggatggagacagttgaaataggaagaaccccacaaaagctggagataatggagaacgatgctgagaaatggaaaagcgagggagtggagcccgaacccctggatttgagtggctcatgtaacactcggctactcacttagcctctctattgctcagtaaaatagggggtgatcatagtgcctgacagtcgtgagaaaagtgtgtgtgtgtatgtacataggtgtgggataggaatagatcatgcagataggataggtctgtgtgttaatgtgagtaagtaagcatgagctattactaaagcttctgatattgggagataaagtattagatggggaaatggagagaggtggtgatggagagtgaatactggaaggacaaaagggaggaaaaaaagattcaaacagaaaatgagaaagggcgtggtgactcactcctgtcatccacagcactttgggaggctgcggtgggaggatcacttgagcttgggaggtcgaggctgctgtacgccgtgattgtgccactgcacttcaggctgggtgacagagtgagaccctgtttcaaaaaaacaaaaatgaattttttttttttttttttgagatggagtttcgctcttgttgcccaggctggagtgcagtggtgcgatcttggctcactgcaacctctgcctcctgggttcaagcgagtctcctgcctcagcctccagagtagctgggattacaggcaggtgccaccaccctggctaattttgtatttttagtagagacgggatttttccatgttcgtcaggctggtctcgcactcccgacctcaggtgatctgcctgcctcagcctcccaaagtgctgggattataggcgtgagccaccatgcccggcctgaaaaagcattttttttttaatgagaaagatggagaaagtcaaatggagaactgaagagagatggagaaaggaagagttggattacagagaaaaatcagactacagaatgactcataagtgaagagagatgcgagctgactaggacagggaagagagatgagggtgatgatgaacaagacggactgaaaaagagacagaggcctgaagatggagtggagagagatggaggggacagagggggaaacaaacccactgaaggccatgagcccagggcaaataggccaagagaccaaaagatggtcagagacacagttatacagaaactagaagatgcagacaatctagaagccaaaaaagatagataccttgagaggagcgggatgctgtcagtggggcccagcatgcataagcagtttctagcctcagaagaatgctctcattttctttttctttttttttttttttttttttttttgagacagagtctcgctctgttgcccaggctggagtgcagtggctcagtcttggcttcctgcaagctctgcctccagggttcgagtgattctcctgcctcagcctcccgagtcgctgggactacccgagtagccaggtgcccgccaccacacctggctaattttttttctccagcctgggtgacagagcaagactccatctcaaaacaaaaaagactccaactgtaagcaaaaaggcattttctggtgtagctgagaagtggggggttgaagggaactaagcttcaagacctaaatgatgttgccaagcttctcttcctctccctctttcacctctccctgtggtgcagtgaccattcttgtgcctgtatctagttatttctctaggatagattttaggaaagactctgtcatgttccagagctaccacaaagagctccaggcttatatcaaacttgcctgattatgatggataaaatgagagcttttctgtcctagcaaccgagtgtaaattccacaaaagggccctgattggcccttcttggatcatgtgtccgcttctcaggccaatccttggttagagggggagtagactactaagactggccaggtctttgttacttgcctacccaataggggttctttgtcttaaaggccctcagaaccatgtagaatcgaggaagggctgttgtccaaaggaaggtggatactgtcctcagaaaagaagtaaagggttgtgccaggcaggcaaaaattacatataacacttgcaaaattttgccttttatctcaatgttctgaatctcactggaccccgggtgaagaacccttgccttattcttttcattatatcacacctctctcctattactgcctgtggagacaaggttctgctgttggttggccatgtgacctacatctctcctttaggtctcaggtgaaacatcccctcctcccaggatccttccctgattcccaagcatgggaaggaggaggaacctcctttggtgtcccacagctccctaggattctgttatcacagtccccatcactggattgtcacagtctgatgacgtgtgtgtcacatgagagatcatgtgatcatggccgtctgtgaggactctggtagtcatattcattacctcctttttctagttcagtgcttaagaaacaggctgttagaaatgtttctaaaaatgggctgggcatggtggctcacactggtaatcccaacactttgggaggctaaggtgggggaattgcttgagcccagaagtttgatatcaacctgggcaacatagtgagatctcatctctacaaacagtaaaaaattagctgggtgtggtggcatgtgcctgtagtcccagctgctcgggaggctgaggcgggaggatcgcttgagtccaggaggtcgaggctgtggtgagccatgattacggcactgcactccagcctgggaaacagagtgagaccctgcctcaaaaagaaaaaaacaaaacaaaaccaaaaaaagcaatgttcccaaaagagaattaatgtcttctgttctctctcttaagaatccagggcctgaaaacccagaatgaacttgtgtccatcccagagatcactgcagatgtcatgaggtaccctttgtgtcaccagctcaagcaggcctctggccactttatcatctgtggtggtcctgtgccgtgaccaggaggaaaaattagctctttgaagagaaagtagttctctattgcaggcactggcctcttaaattgttgcaggtggggaatggatgagaatatttgttttgggtgatcagaactgagactcctattgtggattagtaacatgcctcctcctagaacaagggagggcagggatcgccgagaccaccaccgggctcccagcgaggaagaggccttggagaaatgggactggaattgtccagagacgcgtcgcctcttggaagatgccttcttccgtgaagaggattacatccgtcagggttctgaggaatgtcagaagttttggaccttctttgaacgcctgcagagattccagaatctcaagacctccaggaaggaggagaaagaccctggacagcccaagcacagcatcccagcgctggccgacctacctcgcacttacgacccacgttaccgcatcaacctctctgttcttggccctgccacgcggggctctcagggactgggcaggcacttgcccgcggagagagtggctgagttccgccgagccctgttgcactacctggactttggccagaagcaggcatttgggcgtctggccaagctgcagcgtgagcgggcagccctccccatcgcccagtatgggaaccgcatcctgcagacgctgaaggagcaccaggtggtggtagtggccggtgacaccggctgtggcaagtccactcaggtgccccagtacctgctggctgctggcttcagtcatgtggcgtgcacccagccccggcggatcgcctgcatctcactggccaagcgtgtgggctttgagagcctcagtcagtatggctcacaggtgagtgggacgcaccaggtttccgatttttccagcgtgaccttgggggaataggttgcttgtccatatggcagtatcaataaaaatgaagcacttacccttggacccagcgatgattcttctagaactttatccacagagtggcttgtctgtggtctacatgacaaaggagctagcattaaccagtgtagcactttaacagcaaaacaatgggaaatgtcctaaaggctcatcactttttttttgagacggagtctcactctgtggcccaggctggagtgcattggtgcgatcttggctgactgcaacctctgcctcccgggttcaagcaattctcctgcctcagcctcctgagtagctgggattacaggcacccgccaccatgcccagctaatttttgtaattttagtagagacggggtttcaccatgttggtcaggctgggctcaaactcctgacctcaggtgatccacccacttcggcctcccaaagttttgggattacaggtgtgagccaccacgttgggctgcgagggtaattcttgacgatcactgcaatgcaaactgccatcttggaaggccaataatagtccttctgtctcatggtggtcatgaggatgaaatgggttgatatacataaagcacttagagtggcatataatgtcctggcacatagcagggactcaagaaaaggttattgctatatagttaatattatatatacatgaggcacagtgctagatactttctgtgcattgtcacatggaattctcacagcatctaggaggagaactataagggatggcattgcctgcccaaggtcagttggcactaagtggcagaggtgagattcaaacccaagctgttggactccagagtctgatgggtaggcatggtatttgcttagattttctttttgctttttcttttttttgagatggagtttcactcttgttgcccaggctggagtgcaatggtgcgatcttggctcactgcaacctccgcctcccgggtttaggtgattctcctgcctcagcctcccaagtagctgggattacaggcatgcgccaccacgcccggctaattttgtttgtatttttagtagagatggggtttctctatgttagtcaggcggatctcgaactccctacctcaggtgatccgcccgcctctgcctcccaaagtgctgggattacaggcgtgagccaccgcacccggcctgcttagattttcaatttgggcagggccaggggctggtacccaggctcagggtcctctcctgatcctttctttctcccaccccaggtcggctaccagatccgctttgagagcacacgttcggcggccaccaagattgtattcctgacagtggggctgctcctgcgacaaatccagcgggaacccagcctgccccagtatgaggtcctgattgtggatgaagtccatgagcggcatctccacaacgatttcctcctgggcgtcctccagcgcctgttgcccacgcggcctgacctcaaggtcatcctcatgtcggccaccatcaacatctcgctcttctccagctatttcagcaatgcccctgtggtacaggtgcctgggaggctgttccccatcacggtgagtacttccccctcctcccacatccccagacctccaacctggtctctgtccaaacctggacatgcctcttctctctgctgctgtatctcccatctctttcatttaaagatgttctctttttttaaagctaccattttctgagcattcataatcagctggttagagtgctaagtgcttgttagagtaaaagctgttacaagaagacccaaaaatggctgggcgccgtggctcatgcctgtaatcccagcactttgggaggccgaggtgggtggatcacgaggtcaggagattgagaccatcctggctaacatggtgaaaccccatctctactaaaaacacaaaaacaaaattacccaggcatggtggtgggtgcctgtagtcccagctactcgggaggctgaggcaggagagtggcgtgaacctgggaggcggagcttgcagtgagccgagatcgcgccactgcactccagcctaggtgacagagtgagactttgtctcaaaaaaaaaaaagacccaaaaatgtaaagtctcaaataagagaagtttatttctctcatataacagtgtggctggtccaggctgttgggcaactctgttccatgtggtcattcagggatccgggctcctcctttgtcattactctgccatctcactgggcaggatttctcaaagtcagcaagattgacatttcagtctggataattccttgtcgtgggggctgtcctgtgcattgtaggatatctagcagcatccctggccctacccactagatgctagtagtcttctcctctggttgtgactattaaaaatgtctccagacattgccatatgttccctctggggcaaaaccacccctaattgagaaacactgtcctagtgagttatccttgtctgtatagtcaagacttacaggaagaacttcattgtctcttgtgatttctggttccggatgcccatcaatttgccttctaagcagccataaaaaaagaaagaatgggtcgggcacggtggctggtgcctgtaatcccagcactttgggaggctaaggcagaaagatcacgaggtcaggagcccaagaccatcctggccaacatggtgaaatcccatctccactaaaaatacaaaaattagctgggcatggtgacgcacgcctgtaatcccagctacttggaaggctgaggcaggagaattgcttgaacccggaggtcgaggttgcagtgagccaagatggctccactgcactccaccctgggaacagagcaagatcccatctcaaaaaaaaaaaaaagaaagaaaagaaagagagagagagagtgcgagccgagtgtggtggctcatgcctataatcccagcactttaggaggccgaggcgggtggatcacctaaggtcaggagttcgagaccagcctggccaacaaggtaaaaccccgtctctactaaaaatgcaaaaattagctcgagtggtggtgcgcccctgttatcccagttactcaggaggctgaggtgggagaattgcttgaacctgggaggtggaggctgcagtgagccgagatcatgccactgggtgacagagcgagaccctgtctcaaaaagaatgaggctgcttcctgagaaatgttttctagggtttttgttttttgttttttgttttttttagtagagacgacgtgttgctatgttgtctgcctggtcacgcatacctgagctcaagcaatcctcccgccttggcctcccaaagagctaggattacaggtgtgagccaactatgctgggaaatcagccaaccaacctggctcaggctcagggtcctctcctggtcagccaaccaacctgatttctaggtttttaatcctggtttcatcacctagaatatttttcttgttgaagctactctaaacataagataatgcatgcattgtaagtatatagcttaattagttttcaccagttacatacatctgtgtagctagcacccaggtttagaaaagtcaaacattgccagcaccccacaagccttgcagttgctttgttactttgtctttttattacatccttcagaaattatctagctggagtgtgctgtctgtcacctgactgtttctcaattaggggtggttttgccccagagggaacatatggcaatgtctggagacatttttaatagtcacaagcagtggagaagactactagcatctagtgggtagggccagggatgctgctagatatcctacgatgcacaggacagcccccacgacaaggaattatccagactgaaatgtcaatcttgctgactttgagaaatcctgcccaatgagatggtggcataatgagaaaggagaagcctggatccctgaatgaccacatggaacagagttgcccaccagcctggacccgttgcactgtgtcttctccgttagcctgtggtctcccccgtcagcctgcagcctccccagcccattgctctgagctggagggacagggtgtgcttctacctggggctgtctcctctcaggttgtgtaccagccgcaggaggcggagccgaccacgtccaagtcagagaagctggacccgcggcctttcctgagggtgctggagtccattgaccacaagtacccgcctgaggagcggggtgacctcctcgtcttcctcagcggcatggcggagatcagcgccgtgctggaggctgcccagacctatgccagccacacccagcgctgggtggtactgccactgcacagcgccctgtctgtggccgaccaggacaaggtatcacaggaagcccgagtggggcaggcggggggtctgcatgagtcaggggtggctgcgcacaggacttgtgtaactccacaaacacagggctcgggggctgtacttgtgcaaagtcgtagccacctagtggcagagccaggctgcgaacccaggtagtctggccccggagcccatgctctaaaccagaggtcggcaaactttctataaagggtcggagtagatgatgtcagtcctatcgaccatgggctctctgtctgtcacagctactcagccccactgttgcagcatgaaagcagccataaactgagtgggtgaggctgtgttccaaaacagtttttttttttttttgaaacagggtcttgctctgttgtccaggctggagtgcagtggcacgatcagggctcactgcagccttgacttcttgggctcaagtgatcctctctccttagtctcccaagtagcaactataggtgtgtgtcactaaactccattaatttttttttctttttgggacagagtctcactctgtcgtccaggctggagtgcagtggcatgatcgtggcttactgcaatctccacctcccgggttcaagcgattctcctgcctcagcctcctgagtagctgggactacaggcacccgccaccacgtccggctaatcttttgtatattgagtagagacggggtttcgccatgttggccaggctggtctcgaactcctgacctcaagtgatctgcctgcctcagcctcccaaagtgctggggttacaggtgtgagccactgtgtccggcctccgttaatttttttttgaattttagtagcaaagaggtctcactgtgttgcgcaggctggtttcaaactcctgagctcaagcgatcctcccctagtgggggcagtgccagtttatgcttcagcagatccctctggctgccatgtgagtctacaggccagagatctgaggggaagctggagtaggatcagagtgggcgaggagaggcctggaccagggcaggggctgggctgtcggaggagggaaggatttcaagaaaagttccagatggcctggtacattggctcatgcctataatcccagcacaggaagctgagacaggaggatcactcgagctcaggagttagagaccatcctaggcaacacagtgagaccttgtctctacaaaacggaagaaaactagctgggcatggtggcatgtgcctataatcccagctacttgggaggctgatgcaggaggatcgcatgagctcaggaggtcagggctgcagtgagctgtgatcacgccactgcactccattgtaggccacagagtgggatcctgtctcaaaaaaaaaaaaaaaagttcaagatgttcaggtcgggggagcaggtgtggtggctcatgcctgtaatcccagcacattgggaggccaaggcaggcggatcacctgaggtcaagagttcaagaccagcctggccgacatggtgagaccccgtctctacttaaaatacaaaaattagccgggcatggtggcgggcacctgtaatcccagctgctcgggaggctgaggcaagataattgcttgaacccgggaggcagaggttgcagtgagccgagatcacgccactgcactccagcctgggcgacagagcaagactccgtctgagggtgggggagggcccaggatggcccaggtgatggggtggacggtgagccatctccaaaagggaggtctctgaaggaggaaagggttccagggaagctgctgacacgggggtgggcaagaaattggacacataggttagtcggggctgagttagttcctgacaccaccccctcccttcctcccaggtatttgatgtggcaccccctggagtccggaaatgcatcctctccaccaacattgctgagacctcagtcaccattgacgggatccgcttcgtagtagattccggtaaggaccaccatgagcccctacccaccacccccaaggacttaggagcatggggtccggaggtgtgcgtgtgtggcaggggcgcaccagcttggattgggaagtacagttgactttcccatatccaaaatgcttgcttgcaaccagaagtgtttggaatttcgggtttttttgaatttggaatatttgtatcaattttattatttgagtatgtcaaatccagaaatctgaaatcctccagtgagcatttcattggagggtcacgttagtgctgaaaacatttcagattttcgagcatttcagactttggatttccagaattgggatgctggaagacgatgtgtggggccatggaccaatggcaacatcttagtttttctcacaccttccaagcctgcttctgccctggggcctttgtactgttctctctgccgagagctgtctttctccaggtatccacacaggtgacgccctcacctcatttcagggcccgcataaatgtccacccgtcagagaggcccatactgtccactctgtctaagagatatcccctcctccatccgctgttgcttgtcatatgagggggattgacattctgtttgttgttgttgttgttgttgttgttgttgttgttttgagacggagtcttgctctgttgccagactggagtgcaatggtgcaagctccgcctcccgggttcaagtgattctcctgcttcagcctcccaagtagctgggattacagacatgcatcaccacgcccggctaatttttgtatgtttaggagagatggggtttcaccatgttggccaggctggtctcgaactcctgacctcaagtgctgcctgcctcagcctcccaaagtgctgggattacgggcatgagccaccacgcccagcccgacattctattttatgtgctgctctgtttgctcactttctgtcttcctgactggaatgttctctgggaagtcagcatagcatagtgtttggagacactggagcctgcctggccaggtttagtgctggctgtgtggctggggtcatgtgactgacacttcatgtatcggttggctcatctgaaaaatgacaatggcaggccgtcccggctgggcgcggtggctcacacatgtaataccagcactttgggaggccaaggcaggcaggtcacttgaagttaggagtttgagaccagcctggacaacatggtgaaactccgcccctactaaaaatacaaaaattagccaggcatggtagtgcgtgcttgtagtcccagctgctcaggaggctgaagtgggagaatcacctgagcccaggaaatcgaggctgcagtgacctgtgattgtgccactgcactcaagcctgggcaacagagcgagaccctgtttaaaaaaaaaagagagagagagaaattaaaaaaataatgtctgccaggtgctgtggctcatgcctgtaatcccagcactttgggaggctgaggcaggtggatcacctgaagtcaggagttcaagaccagcctggccaacatggtgaaaccccatctctactaaaaatacaaaaatgacccgggcatggtggcgggttcctgtaatcccagctactcaggaggctgaggcaggagaatcgcttgaactcaggaggcagagtgagccgagattgtgccattgcactccagcctgggcaataagagtgaaactccatctcaaaaaaagaaaagaaagaaaatgtaaaaaaaggttgttctgacactggaggaaatatggtgctctgttcagtcctgtgagactaggacctttgtttagctcactgctgttcccctagtgcctagtgcagtgcctggtatatagtaggtgcttaataagtatttattggataagtgaacctctgaagaaacaaagacttgggaaaataaatgaaaagatgtgtgagtgaaaggctgggtgcagtggcccacgcttgtaaccccatcactttgggagcctgaggcaggcagattgcttgagcccaggagtttgagatcagcctgtgaaaccccgtcactgcaaaaaattagccgggtgtgttggtgtgcacctttagtcccagctactcgggaggctgagctagtaggatcatcgcttgagcctgggaggttgagactgcagtgagctctgactgagccactgcactccagcctgggagacagtgagaccctgtctcaaaaaaaaaaaaaaaaaaaaaaagatgtgtgaggaaatgaaagaataaatgaacaaaatgtcagagttgggcccagaataagccctcagttagcattaacagaataaaggagtaagtgagggtgttggcgagtgacaagagccaggcgcgtggccagctgcacgtggctgccacacacagactccctttcctcattgctcccatccaggaaaggtgaaggagatgagctacgatccgcaggccaagctgcaacggctgcaggagttctggattagtcaggccagcgcagagcagcggaagggccgggcgggccgcacgggccccggagtctgcttccgcctctatgccgaatcggactatgatgccttcgccccctaccccgtcccagaaattcggagggtggccctggactcgttggtgctgcaggtgaggcatgggcagaaaggggactatatcctaactgctggcacagggaggaacctgggaggccttttttattttattttattttattttattttgagatagcgtcttgctctgtcactcaggctagagtgcagtgctgtgatcatggctcactgcagcctccatattacaggctcaaatgatcctcctacctccacctgccaagtagctgggaccacaggcacacaccaccacgcttggctaacttttaaatttttatttatttatttatttttgagacggagtctccctctgtcgcccatgctggagtgcagtggtgcgatctcggctcactgaaacctccgcctcccaggtttaagtgattctcctgcctcagccttcctagtagctgggactacaggtgtgcaccaccaagcccagttaattttttgtatttttttttagtagagatggggttacaccatgttagccaggatggtcttgatttcctgaccttgtaatccaccctcctcggcctcccaaagtgctgggattacaggcatgagccaccgcgcccggcctaactttttttatttttagtagagatcaggtcttgctatgttgcccaggctggtctcaaactcctgagctcaagtgatcttcccaccttggccttccaaagtactgggattacagccatgagccattgtgcccagccagccaggaagcatttacataggacccaaccccagagtgtcagggtcaggaaggatagggctagccaagccactgaggggaacccatcccttccaaatgtcaaaacccttgttgaggggagaattgttccttaaatccatagggtcagctgggcatggtggctcacacctgtaatcccagcactttgggaggccaaggcaggtggatcacttgataccaggagtttgagaccagcatgaccaacatggtgaaaccagtctctattaaaaatacaaaaaattagccgggtgtggtggtgtgcacctgtaagcccggctatttgggaggctgaggcaggagaattgcttgaacccaggaggtggaggttgcggtgagccgagatcacaccactgcactccagcctgggcgatagaacaagactccatctcaaaaaaaaaaaaaaaaaaaatgtccatagggtcaaaggaagaaccagtgactcaatcagaatgctttcagctgtaacaggaaacctagcaggaaagggcttttaaaaccagggtttctcaatacattttatgtcatgatttgtatctcatttgttaatttagcataggttagactgccatgacaaatacacatggtcacgaatggccaacagcggaatggtggtttacaggttggcaggcaattttctttattcagggacccagggtccttcactcttgtggctctataatctccccaggggcttttcctgcatatgtgtccagccagccaaagggtcaagggcatgggaagtgagtacaggagggtttgcgggtcgagcctgcaaatggtgcacttgccttgcactcaccactcctggtcagtcctcagtctcgtggccacgcccaaccgtgaaggaggctgggaagtgtagtccttgtgctcaggaacaaaaggaaaaggaaagttgggagcagctgatggtgtctgccacaggctcacgtgcgggtgtagcacaaaccagtggccttcctgcaggaggtgcacactattttctattctgtttgatttcatcttttaaaaaaaaaaatactagtgctgccgggcacaatgagtgactcatgcctgttatcccagcactttgggaggctgaggcaggaggattgcttgaggccaggaagtcgagaccagcctaggcaacacggtgaggccctgactctagaaaaaatttaaaaattagcccagtgtgatggcacacacctgtggtcccacgcaggaggctgaggcaggaggatcgctagagcccaggagttcgaggctgcagtgagccttgattgcatcactgcactccagcctgagtgatagagcaagaccctgtctcataaaaaaacaaagtccatggggtaggtagtcttaccctaatttttggaccagaagaaggatgcagagagagagaaaatattgccccaggtcacacagctggcaagtagtagagtcagggctccatccgaggccaccaggcgtcagagcctgcttcgtgagtggccgctggctccaggcacagtgggcgtcacctcctcctcctttaccatccggaggcagaagcaaggaactgcccttctctgtgggtctaatttttaaggccacaggaacattttctagactcctctggccagtctctcatcctctcttgtcagcagaaccgggtcatatgtgttcaccctatgccccgcaattgtctagggttgtggcattgcctgagttgatcagagcagtgtctcagccccagctgcatactagaaacacctggagaatttaaaaaaaccccaggccctgccccctgcctctttaaattgagcttctaatgtaaaggttatttatttatttatttatttatttatttatttatttttgggacagagtctcactctgtcgcccaggctggagtgcagtggtgttatctcggctcactgcaacctccacctcccaggctcaagtggttctcctgccttggcctcccgagtagctgggaccacagatgggtgccaccaggcccagctaatttttgtaattttagtagagagggagtttcaccatgttgatcaggctggtcttgaacttctgacctcaggtgatctgcctgccttagcctcccaaagtgttgggattacaggcatgagccaccgcgcccggcctataaaggtttttaaatgagtattgggtgaactcatagacggcatcaaggcttggtcagcagggaggaaggagcagcagctgcttgcaggtggacgccagaacttctagtgccctcggatcaaagccaggcaaacagacttctctgagcttccttctcgctctctggctgtcacatgagctgccttgccagcctctccttcttccagtcaccagagaggtgctgtttgcttacgtatgccacgccagaccccggggtggacatatgctgtcacttaattctcccaccatctactgcctgcctggactgctgcattaattgggattcttttggttgtaagtgagagaaatacaactgaaactattgtaggcagaaagggggatcttaccattttgtgcattcatgaggcggcatgtctaacttaggaacaatccaagaatttctccatctgctgtaggtgggcccatttccaaaaaatggacaaagtcaaaggtcacagcagttctgggttaataagatagccttccatcctggccacaaccagagaggatgctgggaatgctcttcctggctccagtctcatggaaggattctgattggtccagctcaggtcacgtgcctctcctccatggtctggggcaagatgtgctaggcagacagatacagagacagcagccctccttgcctgcctctgcacagtggatcttgacattgggaattttattttattttattttattttatttttgagatagaatctcactctgtggcccaggctggagtgcagtggtgcaatctcggctcactgcaacctccgccttccaggttcaagcaattctcctgcctcagcctcccaagtagttgagattacaggcactcgccaccacacctggctaatttttgtatttttagtagagatggggtttcaccatgttggccagtctggtctcaaactcctgacctcaagtgatccacctgctgtggcctcccaaagtgctaggattacaggcatgagccactgtgcctggctgacactgggaatttgagatggagtctcggtgtattgccaggctggagtgcagtgcagaggcgcgatctcggcttactgcgatctccacctcctgggttcaagcgattctcctgcctcagcctcccgagtagctgggattacagtcatgcaccaccactaatttttgtatttttagtagagacggggtttcaccatgttggccaggatggtcttgaactcctgacctcaagtgatccgcttgccttggcctttcaaagtgctgggattacaggcatgagccacaacgcccggccaacactaggaattttaaaacgtcatgaatttgtgatctctgagccccgctgtgctgcacagtggctcttgtgttccccaatcttgggggttttgcttctcattctagatgaagagcatgagtgtgggggacccccgaaccttccccttcatcgagcccccaccaccagccagcctggaaaccgccatcctctacctccgggaccagggggccctggacagctcagaggccctcacacccattgggtccctgctagcccagctgcctgtggacgttgtgattggtgagtacccacccccctcctgatcactcagggccccaggagcgggtatgggcacagctcactctctgagtggcctgggggcaagtctgtttcttccctgggtccagttcatttattcactcttcactgggccaggcactgttctaggtgctgggcatatagcagtggacagaacagacacaaatctctggcctcagggagctgacattttggtgaagaagaccagcaatacattaggacaataaggaaaaggcatagtagatcagatggtgcctagtgttctggagagaagaaacaacggggttggggaatggggagttgcagtttgtaatacaggcctcatgtataaggcagacctcatggggaaggtaacatctgtgcagagaaatggagatgagggctaggagccatgcaaatactagaacatgcttgccagcagaagtcgagaaacatggccggcacagtggcccacacctgtaatcccagcactttgggaggctgaggcaggtagatcacgaggtcagcagttcgagaccagcctggccaacatggtgaaaccctgtctctactaaaaatacaaaaattagctgggtgtggtggcacacgcctgtaatcccagccacttgggagggtgaggtaggagaatcgcttgaacctgggaggtagaggttgcagtgatgcagtgagccgagaccatgccattgtactctagcctgggcgacagagcgagactccatctcaaaaaaaaaaaaaaaaaaaagcaaaaacaaacaggtgagattcattttgataaaatagctgattcaacctaatatacctaaaacatcacaattttaacataatcaatagaaacatttttgcaagattttatgttattttttaccatacgacgtcttggaaatcttggtttggaccagccatgttcaactgctcagtagccatgtgtggccagaggcggccgtattggacagtgcagatggtgcatgagggtgttcgggcagtgggaacagccagtacagaggccctgtgggggcacatgcctgctgctacaggaacagtgaggagccccgtgtggctgcagtggagtgagagggagaaggtgggagatgtaaccaacagtctcatcattcattcattaaatcctttttttttttttttttttttttttgagactgagtttcgctcttgttgcccaggctggagtgcaatggtgccatctcggctcaccacaacctccacctcttgagttcaagcgattctcctgcctcagcctcccgagtagctgggattacaggcatgcgccaccatgcccggctaattttgtatttttagtagagctggggtttctctatgttggtcaggctggtcttgaactcccgacctcaggtgatctgcccgccttgacctcccaaagtgctgtgattacaggcttgagccactgctcccggtccattgaatgtgtgtgtgtgtgtgtgtatatatatacacacacacacacacacacacatacacacacatatatatacatacacacatatatatacacacacatatatatatgtttttttttctttttgagatggagtctcgctctgttgcccaggctgaagtgcagtggtgcaatcccagctcattggaacttctgcctcctggattcaagcaattctcctgcctcagcctcctgagtagctgagactgtaggtgcccgccatcatacctggctaatttttgttttgttttgttttgagacagtgtttttgctctgttgcctaggctggagtgcagtggtgtgatctcagctaactgccacctcctgtgttcaagcaattctcctgcctcagcttcatgagtagctaaaattacaggctcacgccaccacgcctggctaatttttgtatttttagtagagacggggtttcatcatgttggccaggctggtctcgaagtcctgacctcaagtgatctgcccacctcagcctcccaaagtgctgggattgcagacttgagccaccgtgcccggccagtatttgttttttcagtagagaaggagtttcaccatgttggtcaggctgatctcaaactactgacctcaagtgttctgcctgcctcccaaagtgctgggattacaggcatgagccactgcgcccggccaatatttgtttttttagtagtgtcaaggtttcaccatgtcggccgtgctggtcttgaactcctgactttaagtgatctgcccacttcggcctttcaaactgctgggattacaggtgtgagccacagctcctggcccattcattaaataatttttgagcacctgctctgtgccaggtcctagtctagatgccagagatacaacagtgaataaaacaaaactcctgccctcacggagctcacatgtaacaggggagatggacaggggcagataaatgagtgaaaacacggaatgtcagccgctgattgctgctcaggtggatgcagggcacggtgggcacagtgggggctgggagcagtgttaattggctgtcctgggaggccaattaacagtgacatctgggcagaggcctgaaggaggggaggggacagctgtccctctggccctgggtcaggtgaggagctttgaattaaatgggaagtgtttaagtggaactgggtcctaagtggctgaaggtggccagaaaattgatcagttgacctggcggttctgtgaggatctggaaagggcgggtccacagaggtcgacggagaccattttcagttcccagccctcctgatctcaggtcttcagtagccagtcacaagcagatgtggtgctcctcgtccccacgctgtgtcatcaggaatagggcgttaatcttgagggatttggggccagcagaccctctgaccctgtcgttcttgtgtgcaccgtcagtgtctcaggcactcacctgacgctgcagatgccaccaccagaggctgggtgtggcctgtggtgtctggcttgcaaggctgtttcagagaatgtgacgcaaagtgccctggttgtgcgtgagtgacaggaaagacaggctctctcgcttggattccccagcacttggggtcatgacagggcctcccttgggaggcacaggcaggtggagtacccaagatcccccaaacgcagaaagaagtcttggcttttccacagctcagacccctcccacctctctcctctgcacagcgtgtccccagctctgccccgcacccctctcttgcgggctcaaggatgtcaaaactcttcctctccctcattcctgagtcatgctcacccctcccggggagctcactgactgaggcttgttcatcttgcctgattctcctgactcaagactttctatttccagcagcctgaggcccaccatggcaggaccacccatgtatgtgtgttaacaccattaaagcccccatccttgcagcacagcagggcttcagtgtgggcaggaggctggatccgctggacttggagggctgcccaggctaagaagatggttcatttttgttttatttatttatttatttatttagagatggagtttcactctgtcctccaggctggagtgcagtggcatgatcttggctcactgcaacctccacctcccgggttcaagtgatcctcccacctcagcctcctgagtagctgggattataggcatgtgccaccacactcagtttttgtattttttagtagaaacagggtttcaccacattggccaggctagtcttgaactcctgacctcaagtgatccgccagcctcggcatccctaagtgctgggattacaggcgtgagcccctgcgcccggcttcatttttgttttggaaggaaacagggctagagcagggagaatctgaactgagaagcagaagaatgttctgtgagctcttgctgtgtgccggcgaaaggctctgtggactttccgttatttcatccttacctgctgagggcagggcctctgatcgcccccagtgtgtagatggggaaactgaggctgggcccaggaggctcctgagggcatggggaagcctggctttgatcggaggtgatggtaaatgcctcactcacattatctccctgagggctgggggcaggtgcccccacttgccctgtggggaaaacgaggctcagagaactgctgctcagggtcacagtgggaactgagaggcacggatgaccctgtgctgggcgtcctctgtgccaggtggagttctgaacgcttcacagggtgaaacacaaagcatcctcttggcagcctgaggagaggccaatgctgttgttcccccgtttacagatggggaagcagcgtcacggcgaggtggggccacttttccctggtgacagagctggggtgtcctggaataggacaggggcctgcacagtacagccccaagccctgctttactgccacctttgttttatgaggccagctttttttgtttgtttggtttttgagacgaagtcttgctctgttcactcaggctagagtgtaatggcaagatctcagctcactgcagcctccgcctccagggttcaagtgattcttctgcctcagcctcccaagtagctgggattacaggcgcctgccaccacacccagctaatttttgtatttttagtagagatggagtttcaccaggtttgccaggctggtctcgaactcctgacctcaggtgatctgcttgagtccagttttgtgacaggcactatggaaagtcagtgaaggtcaacggtgggggcgggtcagacacatgacacagaccactagttactggacaggtgggcaagggagcccccagaagtccagcgtcagctcgggcgcccagaaccaggggatgtctagatgcccgctgtggagcgctcacagatggagacagggttcacctgtctccaggtgagactcggccaccctgggagacggttcctgccacttttcctctctgtggcctcccctctgtccttcctcccctttccctacctctcccagcccctgccccatctttctccatgtcttcgccttctgtcccctcttcctcttccacttccaccttgacctaaacaaaggctgcaggagaagattcatcctgtgataagcacaggagtcagtgcctgcctgtgccagggcagagctagagggactcacttacaggtgacactctagcgcggaggagagacgtccaccgtgatgggtcaaaatgagctcctagagcaaagaccaagccagggaagcatcagagcgctgggggagtgggttgtaaatagcaaagtggggaacttggtgacaggagtagtcagcgcttagacagtatctcctgtgtgtccaaggaggcagggactggccatctccaatctacaaatggggaaactgaggcccttgcccatggccacgtgaccagaaagcacagcgcgtgggtttgaatctccatctgggtcacaagacccttagtgggcaagatggagggggtgggagcaggagggcaggcgggagggcaggctggggccccgaggggtgagggctgcgcctgtcctggcacccaggagcctcaaccccgtgtccgccgctgcagggaagatgctgatcctgggctccatgttcagcctggtggagcctgtgctcaccatcgcagccgcacttagcgtccagtcgcccttcacccgcagcgcccagagcagcccagagtgcgcggcagcacggcggccgctggagagcgaccagggtgaccccttcacgctcttcaacgtcttcaacgcctgggtgcaggtgaggctggtggtgggggccctctgtctgtcaccctgctcagggccaaggccttctgtggctgtggctcctcctcgtgtcccaccctcagccccaccctgggaggaccactgagccccccacagactgggcctgcctggggagggccatgtctccatcatccatgctttcggctcaggacagcatgtgcccaggcccggggctgagaggagcctggggtttctgaagcactgatgaaaacctgtgccacctggagaaagtccaggctccttgggaggcatctggagatccagtatatgtcccttgagtcctcaccctaaccctggccctgtagtgtagtgctgggggcccatcagtgccaaaactaccctggccctgccctcccggggttcacagcccagtgcagggagacagaccactgatgtgacagtgacaacccagagagggctggaatggggagtccagggggctgggacaacccagcggggcatctaacccagtttgtgggtagtctgggagggcttcccataggagggggcactggggctgagacctggaagcaggagagcaggtgtccctgagggatgcccattttggggctctgggtgctcggtcagcccctccctccccgcactggccaggccctgacaccctggcgtctgctcctccacccaggtgaaatctgaacggagcagaaactctcgcaagtggtgccgccgccggggcatagaggagcatcgactgtacgaaatggccaaccttcggcgccagttcaaggtgaggctcgggaggaggggtaaggccggccccactcaggcagacgtgtgtaagcacactccagaacactgcttccccttcccagacagtggtcagaccagaatcccaccctgcacccacctcccccaccacccggtgaccaggtgttggggcagctgggcagagcaaagggagcagaaatccaggagggcttcctggaggggtggaccgagtcagtggacatgcagcatcctcgggaagagctcgccctccggactggggatgctgagctggctgcatgggcatggtgttggaggcagcctacggttgtggttggccggcacatctggagccagacacctcagccacagatcccagctctgccatttctgacagcgtggccccgggtgtgttactgcttgtctctgggcctcagcttcccctcgataaaaagagaggataaaaatagcacttgccagccgggcgtggtggctcacgcctataatcctagcactttgggagggcgaggtgggtggatcacgaggtcaggagatcgtgaccatcctggacaacatggtaaaactccgtctcttctaaaaatacaaaaattagccaggcatggtggcacgtgcctgtaatcccagctacttgggaggctgaagcaggagagtcgtttgaacccaggaggtggaggttgtggtgagccgagattgagccattgcactccagcctgggcaacaagagcgaaactccactcaaaaaaaaaaaaaaaaaaagatttgggtttctcctgcgcccacacagttctgcagcttgtttcatagatactgttctccatctgagtgcagacagacctgctgttaggtccttttccatggttgtatccatggattgagaatagaataaaagggttcctggtgtaatccattctgtttggttggagatgggcaagctgaggcccagagggggcagtcacccagccgacacctccggtaccatttctggggtcccggtgttggggaccacagatgccccgattgctctgagcatgggtcccgagttctctctggctgctagagcagtgttcaggcttcattggtccccagatgctttgagaatctaatggaaagtgtgagccctttgcacccacatgcacacatacagacacacatgcacgcacaatctcctgtgtcctccatcggtcagggctcagcaggaaacagaaggtccaaccaaattgggtcacttgaggaatgttgacaagatgtgggcacggggagggcaggggtctcagattttatgggtcacaggcagctggagggtctgttgggtccagatggccaaccccgccgagccccctcctctctccacttggtcgttctgggatgaggcccaggacttggcattcccagcatgtgcctagatgccccagggctacactcagaagcactagtgcaggacgcccaccagggctgtgtgggaaagcagggccccccagacccaaggggcaggtggggcagtcagcagagcctggagccagctgtgggaaaaggcactggacgcccgcacctgcctcctcttgcccctggccccggtgttccctccactgaccagcgaggacagctctctctctggagcagcgatccatgcccagcaccatgcgaggggctgttttcagccccctttgggcactagcagccctgccactgggagggtccccatttccatgagtccagagcccactgagtctgccctgaggccctcacccctacccacctgcccctaggagctgttggaggaccacgggctgctggctggggcccaggccgcgcaggtaggggacagctacagtcggttgcagcagcgccgggagcgccgggccctgcaccagctgaaacgccagcacgaggagggcgcggggcgcaggcgcaaggtgctgcggctgcaggaggagcaggacggcggctccagtgacgaggacagggctggcccagcccccccaggggccagtgatggcgtggacatccaggtgggcgccatgggctgtggggtgtgggggtttaccaaggtgggccttggcctctcctgggggggtcccaggggacatggccctgtcctcatttcaggagccgggtttccatggacggtgcttggtcccaggtatctgcagagcctgggggtctgcggatcatggtaggagcccctcaggtcccctaagactctgcctccccgtgctccccccaggatgtgaagttcaagcttcggcatgacctggcgcagctgcaggccgctgccagctcagcccaggacctgagccgcgagcagctggctctgctgaagctggtgctgggccggggcctgtacccacagctggccgtccccgacgccttcaacagcagccgaaaggactcagaccaggtggggcctgttctgccccatcctatgttttgtcctccaacacacgaaccctgagtgcctgtcctgtgccgggaatgcagtggtgactgaaacaaccctggttctgtccccatggggctcacaacccagtgggaggacagacccatccccagacaacccagagtgggcagggcttggggagtcaagagcactataggagcccacagggggcatctgccccagatttggaggagtcagggagggcttcctggaggagggaacctgggccagagggtggaggagaggcatcctgggcagaggagagagcagataggagggcttgtgctttctctctgtcctccgcagattttccacacgcaggccaagcagggcgccgtgctgcaccccacctgcgtcttcgctggcagccccgaggtgctgcacgcacaggagctggaggccagcaactgcgacggaagccgaggtacagtgagcccaggcggaaggaacccccatccgggatgtgaggggcagggataccgtgaactcccaggcccctctggctggggctcccacaccggcccaggctggtattgacgggggcccacaggaggggaagttccagggccaggcctccctgggtagccttgggtgactcacccctgctgggcctcaccttccgcatggtggtgatagtcaacctaagccagtgtggctgtgcccagagagtgagcaccggtcagggggcctgtcctatggactctgtgagctcccaggtgggtcctgcagagggaggcccccctggcacccgtgtgcatggaagggtgtctcgctgcaggcatggctgcgtgctgggagtcacattcagatttggctgaccttcttgtctgagccaggccaccaaagccatgccgtaagcatactctttctatcgatgtgtactttgaccgggtgggacaggcgggcttctgatgggcctgggtgggccagggtgggcctgagcggtcctcctcaacctttcagacgacaaggacaagatgagcagcaaacaccagctcctcagcttcgtgtccctgctggagaccaacaagccgtacctggtgaactgcgtccgcatccctgccctccaggtgggcctctgccccaccccgcccccatgcccagatatgagagctgcgttgcccagggtggtgggtgggggcaccgcgtgggcttggaggggccacctggcacctgggctggccgcaggcgtcagccttgggccgttgctgtggctgctttttctctcattcatggacttgctcaacagttaacctgccaagtgcctgctgggtgccaggcgctgtgccaggtgccaagggcgcagcagggaaccaggcatgaagcccagcccctgccctctcgggctctagtggcaggggacagtgacagcagtagcacagtgatgccctgagcgacgtgtgggagggtggacacagggtgtggtacaagataaggccacctggtgtccccaggcagagacccaaagaggagagcgtgtggatctcggggcagagtgttccaggcagtggggtggcctgcacagaggctccgaggcagacatgtgcctggcgtgcagtcagcaagggagagcgtgtggagatgaggccagagaggcgagggagacaggaccctggggacttctcagagctgggacagggtcccagccaggagggctggcagctgccaggagggagaggagggtgctgccccggtggaggctgaggccgaactcagatcatggatgcccttgcatgggcaccggcagcagagccatgggccccatggcagccactgccctgcccctagtgctcctcgagcgtctttgtgatcctaggcctggcctcggagtcctcacgcagccctgtgggtctccctttatagaggggactgaagctcaggcaggggcggggatacgtcacctaagtcacacaccgagcaggtggccaagccagagctcctgggtcacactgccccctcctgcctcctggctcactaccagcactccccggcttgggtcccagggaacgtggaggggagagaggaacctgcaggctcctagagcctcagggttttgttgacactgcgattgccaccaacaccacaaaagccagctcagctcagtcacttctgtgtgtgtccacacctccctcgagcccgtctggtgggccaggcactgttagtgttcagtgttctggggccgggggtgcagctgtggtcaatgtcaaccaaactccccaccctcatggggctcagataggatggtagaggcagacggcaaaccaaaagggtgatgccaggtgctcatgtgagcatgggaaagcaggcagcacgcaggccgagggacagaggattggcgaccagccgggccgcaggaagcggaacagacctgctacctgaggcgctctctccctgcactggactgcttgttgagagaatctggccagctcacacctggaatcccagcaccttgggaggctgaggtgggaggattgtttgagcccaggagttcaaaggcagcctgggcaacatagggagactctatctatctctacaaaaaattttaaaaagttagctgggcgtggtgttgtgtgcctgtaatcccagctactcgggaggctgaggcaggaggattgcttgagcctgggagattgaggctgcagtgagctgtgattgttgacactgcactccagcctgggtgacagagtgagacactgtctcaaaaaataataagccgggcatggtggctcacgcctataatcccggcactttgggaggccgaggtgtgtggatcagttgaggccaggagtttgggaccagcctagccaatgtggtgaaaccccatctctactaaaaatacaaaaattagccgggtgggtggcgcgtgcctgtaatcccagctactagggaggctgaggcaggaaaatcgcttgaacctgggaggtggaggttgcagtgagccaagattgcgccattgcattccagcctgggcaacagagtgagactcatctcaaataaataaataaattaataataataataataagaagaagaagatggagaaacttcacattcacataagcaggcagaacagtatatggagccctcctgtaccatccccggtccccaaaccatccacgcatggccagtcctgccctttcctctgccctggccccagccctgaggattttccccaacatcttatgagccacagcactggtaattacagcgctgacttccgtcctcacagaggagcgtgtgctcagggtctgggctctccctgcacgtcgtgtgtgtctgagtgcctgctgtccctctgccaccctgcctgagaatgcagctgtctctctcccagcacgctcccatctgccgccccgccaccccagcccccttccctgactcagcggctgccttgttcatgccgtatccccagcacccgaaggggtgcctggtacagcgggtagatggcgggtaggtggatgcctcacatagacagggctggtgggtgggcaggagcccagccgggcagggcctgtctccaatagcgccctgcccctcccacctactccctgtcttctgccccctctctttcagtccctcctgctttttagccggtctttggacaccaatggtgactgctcccgcctggtggccgatggctggctggagctgcagctagcagacagtgaaagtgccatccgactcctggcggcttccctgcggctccgtgcccgctgggaaagtgccctggaccggcagctggcgcaccaggcccagcagcagctggaggaggaggaggaggatacgccagtcagccccaaggaggtggccaccctgagcaaggaactcctgcaattcacggcatccaaggtaccctccaccagggtgcccgtgcctccctatggccagaaggggcatccgtcactgggcttgagcctcgggaaggcctggcttcccattcactccacatgggcacatttgggggttttcaggccacagaggttcagtcacttacacaaggtcactccactggtctgggtggagctaggatttgatcccaggagcctggttccagaggccacactacccactgctgccttgtttactaagcaccttctgcaagcgtggctgatcccctcttgctaacagtaaaggacaggcagggtgtgagagggaagccgtagacgtctgcttgtggatgggaagaactgaactgagcagacttgaaaccagcccctgactcttaggtggggagtggaaattgctcgtggttctacttcatgtgggtggggtggggagaagggtacaatccaggctgacttcctggagtagaagggcttgaggacaaaggagcaggaacccagtgagccatggagaggggaccaaggctgacatgctaggaggaggaggggggaggtggccagacttgaaggttagactcaaggtctgaatggggtcccaccagtgacaggggcagaagaggggcctggggagggcaatttagatgggggtgggttatcaggtatattctagacagacccctggtcatgtgtgtctgcagccaaattgtgattggtgtaagcacttggctcccgtaactgcaaagcccgagggagggcttcaggcacagctggatccaggtgctttggcggcatctccctgagtctgtctctctccatttcctgtctctccttccttagattccttacagcctccggcggctcacagggctagaagtccagaacatgtatgtgggaccccagaccatcccagccaccccccatcttcctggcctctttggcagctccaccctgtccccccaccccacaaaggggggctacgcagtcactgacttcctcacctacaactgcctcacggtaagcatgaaccctccttccctgaaggtgggatttcaggaagaccccaccaccccgtttcaccttagtccagggacatagttcccaagtggggcccgtggccctgagggcttctgggaagggtcccgggggggcacttgggtggtgggtggcacttggcgggggcccagccctgacagctggcctgccacagaatgacacagacctgtacagcgactgtctccgaaccttctggacctgcccccactgtggcctgcatgcgcccctcacgcccctggagcgcatcgcccatgagaacacctgcccccaggccccacaggatgggcccccaggtaagcacaggactgtggggacccggccacctctgcccagccgtctgcccatcccatgatggtctcctgtgcgtgtgagcacttgctagagcttcgaggactgacgacctccacccgctggccctggctggtgccacacacaggccttgtcctgaagatcaggagcccaaggcagggagagcctggagcgccacctctttctgtctgcctgtcccctgtggtgtctctgtgttgctgtctttgtctctgtttctgtctctctgtggctatgtctcttgttatttttctctgtcctgcagctatctctgccttggtcacctccaccctgttgtcacccagggatgccacacactggggttcagtgggggagatagcactggggccacatgcctccatccccggctggctgtgtctgcctctcagtctccatgtctctccttgtgtctttctctctgtctctctcactggcagggatgcggagtaaagacagacctgtgtatttttattaatctgggagggcttcctggaggaggcaaaactgggttctccaaaggccaggagagaacctgagccccacaggtgcctggcatttgggtgcaggtagacctgtgcactggaacacgcccctcacagcctcctccttttcctcccttaggggctgaggaagctgccctcgaaaccctccagaagacatctgtcctgcagaggccctaccactgcgaggcctgcgggaaggacttcctctttacacccacagaggtgctgcgccaccggaagcagcacgtgtgagctgggccaggagccctgcccacctccgtgcagctgacctgccctccagcccaggactaggggcaggactcttgcctgaacccccagcctgggcttagccctgtggtcctgtcccagtgcagagggcctggagcacggattgtgaataaagcctcacatgctgatacacactgttaggcctgcacctgcccatccagaaagcagcagctgccttgttagtcctccccagggtctagctttccttcttcctgctgcagggtgctgcctgaggggtcctgggtaggaggggcgttagagccagcagggacctcccatgtctccagattccaggtgcaggttcttagcacctccgcagccgctctctcttgagtccatcctcagtctctcctaccccttgaagtagggggaccctgaatttgcccatccacctgggtcactttgagagttgtgcaggggggctgggagcactggtgttcacgtgggaccacaggctgcaccataagacccactcacaataaaaaaataaaaggccgagccgggcatggttgctcactcccgtaataaaaaaataaaagaacaggctgagccgggcatggttgctcactcccgtaatcccagcactttgggaggctgaggcgggtggatcgcctgaggtcaggagttcgagaccagcctggccaacatagtgaaaccctgtctctactagaaatacaaaaacttagctgggtgtggtggtgggcatctttaatcccagctactggggaggctgaggcaggggaatcacttgaacctgggaggcagaggttgcaatgagctgagatcatgccattgcactccagcctgggcgacaagagtgaaactccatctcaaaaaaaaaaaaaaaaaaatcaggctgaggcaggtggtttgcctgagctcaggagtttgagaccagcctgggcaacacggtgaaaccccatctctattaaaatacaaaaaattagctgggcgtggcagcgtgtgcctgtaatcccagctattcaggaggctgagacaggagaattgctagaacccaggaggcggaggttgcttgtgagccgagatcgtgccactgcactccagcctgggtgacagagcgagactccatctctaaaagaaaaaaagaaaatgaaaagaacaataaaatcactcaggagaaaaagaaggcacggcataggaatggaaggaggacaacctgtaggtcctacagatgcgaaaaggagaagagaatacgataaacaacgtgccacacagaaattcactcatttgaaatggaaaaaattattgaaagacactagctacccaaagctcattcaggaagaaatagataaccggaacaactctattaaggaaatgtaattcatagttaacaaagagaacaggctcagatgggctccctggtgacgtctaccaaacatggaaatgatactcgcccacacccacttggccacagcataggggaggacgcctcctgactgatgttatgaggtcagcattatcctgctgctaaaagcaggctatgacaatgcaagaaaagaaaactctaagccttatgaacatagacaaaaaccctaaataggagttcagcacatcatatttagcaatatataaatacagtacatcatggccaactggggcttattctaggaatggaaggttgatttaacatttgaaaatcaatctgattcaccatattagaaacagaaaaaaaaaaaaaggttgggcatggtggttcatgcctgtaattccagcactttgggaggccgataagggtggatcagttgagtccaggagttccagactgggatggggaacatagcaagaccctgtctctattaaaaaacacaaaaattagccaggtgtggtggtgcacgcctatagtcccagctgctcgggaggctgaggtgggaagatcacttggtgtcagaaggcagacattgcagtgagctgagattgtgccactgcactccagcctgggcaacagagcaagaccccatctcaaagaaaaaaagtatataaacccctagtcttagtcagggagatggatttgagagtcatttcccatctccttggctgcacatctcattaaagccttcttcttggcaatactcgctttagtgattggctttctgtgcgaccagcagcaggacctggactgaacccctgatttttggtaacagattccattcaacagtttttttttttttttttttttttttttttttttttttttttttgaggcagggtctcgttctgttgcccgggctggagtgcagtggtgcaatctcagcttactgcagcctccacctcctgggctcaagtgatcctcccaaatcagtctcccaagtacctgggattacaggcatgtgccaccatgcccagctaatttttgggtgtgaataggtttttttgtttgttttttgtagagagtttcaccatgatgcccaggttggtctggaaccatgggcttcctttctttccaaggaagaaggctttaatcagatgcgtggctgaggagatgggaaatcagtctcaaatccgtctccctaactaaaactaggggtttatatactttttttctttgagatggggtcttgctctgttgcccaggctggagtgcagtggcacaatctcagctcactgcaatgtctgccttctgacaccaagtgatcttcccacctcagcctcccgagtagctgggactataagcgtgcaccaccacacctggctaaattttgtgtttggtgatctgcccacctcagcttcccaaaatgctgagattacaggtgtgagccactgcacccggctcattcaacagtatttatttaatttatttatttttgaggcggagtttcgctcttgttgctgaggctggagtgcaatggctcaatctcggctcactgcaacctccgcctcccgggttcaagtggttctcctgcctcagcctcccaagtacctgggattacaggcgagtgtcaccacacccagctaattttgtatttttagtagagacgggggtttctctatgttggtcaggctggtctcgaactcccgacctcaggtgatctgcccgcctcagcctcctaaaaatgttgagattacaggcatgagccaccacgctcagcctcaacagtcttttaaaatgttcctcttgaaggctaacatgcacaaattataagtaaacagcttggtgaattttcccagatgaaacatacctgtgccagcagcacccagataaaaaaataaaacaccagcagccctccacccgctgcagcccagctcctccgtctcccaggagtgtccaatattctttttttttgagatggagttttgctcttgtcgcccaggctggagtgcaacggtgcaatctcggctccctgcaacctctgcttctgggattcaagcaattctcctgcctcagccttccgagtatgtgggattacaggcacccgccaccatgcccagctaattttgcatttttagtagagacgggttttcaccatgttggccaagttggtcttgaactactgacctcaggtgatcctcccgcctcagcctcccaaagtgctgggattacaggcgtgagccactgcacccggccgtgaccaacattcttaatctgtcctctagtgctggccactctaaaacttcacaagaatgtgctgtctgtgtctagcttcttttacccaacatgaggttgcatgggcttggttcattcattctgttccatgaattcatcacaatatatccattcttttgtccagggacatttggcttccagaaacctacccctaacaccagcccttccctccctctgcagaacaaaggccccatcagaggggacgtgctgggtgtcagcgtcagcttctgggaggaggaaggtcagagctaaggcctgaaggatgatgaggtatcaggtgggtggaggggagacgctcaggaggtgggaaaggcggaggtgcacaggcttggttccaggtacaaataacgttactaggagcacacagtacctggattttgatgaatacattgtacatttctgtcctgtatgtatccagggttataggacgtgattataggacacgcatatatgtttggttttagtggactcttaaaaattgttttccaggggccgggcacagtggcttacgcctgtaatcccagcactttgggaggcctaggcgggcagatcacctgaggtcaggagttcaagatcagcctgaccaacatggagaaaccccgtctctattgggaggccgaggcgggaggatcacaaagtcaggagatcgagaccatcctggctaacacggtgaaaccccgtctctactaaaaatacaaaaaaattagctgggcgtggtggcgggcgcctgtagtcccagctactcgggaggctgaggcaggagaatggagtgaacccgggaggcagagcttgcagtgagccaagatcgtgccactgcactccagcctggttgacagagcaagactccgtctcaaaaaagaaaaaaaaaaaaaaaaagaaaacccgtctctactaaaaatacaaaatttagccaggcatggtggcgcatgcctgtaatcccagctactccagaggctgaggcaggagaattgcttgaacccgggaggcggaggttgtggtgagctgaggttgcggtgagctgagattgcgccattgcactccagcctgggcaacaagagcaaaactccgcctcaaaaaaaaaaagaaattgttttccaggccaggtgcagtagctcacacctgtaatcccagcactttaggaggctgaggcgggcggatcacgaggtcaggagtttgagatcagcctggccaacacggtgaaaccttgtctctatgaaaaattcaaaaattagccaggtgtggtggcgggcacctgtaatcccagctacttgggaggctgaggcaggagaatcgcttgaacccaggaggtggaggttgcagtgagccaagattgcactactgcactccagcattgatgacagatctagactccatctcaaaaaaaaaaaagaaaaaaaaaaagagttgtttacatattcctgaaacaagtcgtttgttagatatgcatattgtaaatattttctccaagtctatacttgccttttcatttcattatttctattttttgtagagacaggcagggtcttgctgtgttacccaggctggtctcaaactcctggcctcaagtgatccttccgcctcagcctcccaaaatgctgggattacaggtgtgaaacagtgcgcctgacccatctttatcattttcttaacagtatcttttgcagagcagaatttgtttttttgagacagggtctcactgtgttgcccaggctggaatgcagtggtgtgatcatggctcactgcagcctcgacctgcccgggctcaggtgatcctctcacctcagcctcctgagtagctgggactagacgcacatgctaccacacctggctaatttttgtttttttttgtagagatgaggttttgccatattgcccagcctggtcttgacttcctggggctcaagtgatcctctcaccttggcatcccaaagtgctgggattacaggcatgaactactgcacctgacccacgtttatcattttcttaacagtgtcttttgcggagcagaagttgttgttgttgttgttgttttgagatagggtctcactgtgttgcccaggctggagtgcagtggcataatcacagctcactgcagcctcagcctccttgggctcaggtgattctcccagttcagcctcctgagtagctgggactacaggcaggtgccaccacacccaactaatttttgtattttttgtagagatggcatctggccatgttgcccaggctggtctcgaactgggcttaagcaatcctcccacgttggccttccaaagtgctgggattacaggtgtgagttgctgctcctggacaagagaagttttgtattttgatggaatttcaaattatcattttcttttgtcatttctactttttctgttctacctaacaaatctttgcctaccctcaagatcatgaagttttttcttatgttttcttctagtttaatagttttagatttttaatataaaccgttaggtctgtggtccatttccagttaggcattgtgtatgatgtgagttaacgctcatggctcatttttctgcatatggatgtctaatggttccagaaccattttttgaaaaaagtattcatttccccattgaattaatttaatacctttactgaaaatcagtagactaggctgggcgcagtggctcacgccagtaatcccagcactttgggaggctgaagcgggcagatcacttgaggtcaggagttcaagaccagcctggccaacatggtgaaaccctgtctgtatgaaaaatccaaaaattagctgggtgtggtggcatgcgcctgtagtcccagctacttgggaggctgaggcgggaggatcgcttgaacctgggagcagaggttacagtgagctgagatcgcaccattgcactccagcctgggcgacagagcgaaactccgtctcagagtaaataaataagcaaaaattagcctggcatggtggtgggcacctgtaatcccagctactcaggaggctgaggcaggagaatcacttgaacttgggaggcagaggttgcagtgagctgagccgagatcacgccactgccctccagcctgggcaacacagtgagactctgtctcaaaaaaaaaaagagacagattctcgctttcgctttgtcatctggggtggagtgcaatagagcaatggctcaatctcagctcactgcaacctccacttcctggattcaagtgattctcatgctgcagcctccaaagtagctggaattacaggcaagcaccaccacgcccagctaattttttatttttattattttttatttttttattttttgtagggacaggttttcactctgttggccaggctggtctcaaactcctggcttcaagtgatctgcctgcctcagcctcccaaagtgttgggattacaggcgtgagctaccgcgcctggtcggttcttctttaatttagcaatatttcataattttcagaatacagatcttgcacaaacatagtgcaggcgcccaggccacagtttcccctcaccaggggccaaccattgctgaatcacagagagccctgtgggccgggagtaggcaaggagaatgttgtcatcctcattttgtatggctgctttatcatttgtaaaaggaagttaaggatcgttcccacctcacaagttgttgttgagagttgatgcattagtccacgtgcttagagcagggattggcacataaacggttctcagcaaacatcagctacagtgatcactaaggcaacaggaaaagtaaccaacatttgactgtcactcttcttctgtgacatcagagacaaatagggctacttcccaagtcagcaatatgggtataggttttctctcttacctgctgcacccaatgagtccgtaggccctgtccttcctccctccatcttctgctgtgtgtgtgtgcgcacgtgtgtttgagacagagtcttttactgtcacccaggatggagtgcagtagtgcaatctcggctcactgcaacctccgcctcccagattcaaacaattcttgtgcctcagcctcccaagtagctgagactacaggcatgcaccaccacgcctggctaaactttttgtatttttagtagaggtggggtttcactatgttggccaggctggtcttgaattcctgggctcaagcgatcctcccacctctgcctcccaaagtgctgggattacaggcgtgagccactgcacccagccatgttttgctgtttaccccctgccagttgctgtagcagccacacactgaccatccctggaaggtgacacatgctcattttggtgacaccctcatctccaaaatgcctggctctgtttcccaatatcctttctctcttttttttttttagatggagtcttgctctgtcatgcaggctggagtgcagtggcaccatctcagctcactgcaggctctgcctcctgggttcaaatgattgtcctgcctcagcctcctgagtagctgggattataaatgcccgccaccacgcctggctaatttttgtatttttagtagagacagggattcaccatgttggccaggctggtctcgaactcctgacctcaagtgatcctcccacctcggcctcccaaagtactgggattacaggcatgagccaccatgctgggccccaatatcctttatgcaccttcctgcagtccctggatgagcccctccctccctgtgctcctcccctcctcgccaccctctcgcctccactctgcctccctgtgtaccaaaaccccacagactggatgacttgaaacaacagatctctcacattcttgggggccagaaattggaagtcaaggtgttggctgggctgagctccctcgggaacctgccaggagtcttccctgcctctctctagcttctgtcacactgccggcagtccccttttatagaagggcatgtgtcatattggaccagagcccaccctatgacctcatctgaaaagaccctttttccaaataaggtcacatgcacaggcgctgggaagaggaattagcataccctctggcgggacacaattcaacccatcctaccccgtctaatccactggagggataaagcgctagcccgactctgtcccttctctgctcagagttcttccaggacaatgaaatatcattcagcaatgaaaaggaatgacaggctgggcgtggtgactcacgcctttaatcctagctctttgggaggctgaggcttaagcccaggagatcgagaccagcctggacaacatagtgagaccccatctctacaaaagatacaaaaaatagctgggcgtggtggtatatgcctgtagtcctagctatttgagaggctgaggtgggaagatcgcttgagcctgggtgatccaggttgcagtgagccgagatcacaccactgcactcagcctgggcaacggagcgagaccctgtctctaaaaaagaaacaaaacaaaaaatacacacaaaaaaatggaatgactgacagacactacagcagtgctgcagctggaagacatgctactgaaagaagccagtcacaaagggcagtgtagcgtgattccacttacgtgaaatgtccagaataggcaaacccatggagacagaaaggggattagtggttgccgaggactgggggccggcgatcactgttaggaggttcagagtttcttttggggatgttgaaaatattctagaattgattgtggtgacaggtgcacaaccctataaatacactaaaagccattgaactgtacgctttaaatgggtgaattttatgtatgaatcaggtctcaatgaagctgttaacaaaaagaactctatggctctccagcgccccctggagggatgcaggatcattgccttccctcaaggttccaccaggccggcctcccttccgcggctccctctatcctgtcagggcctgtgcacctccgccttccccatctcctgagcttctcccctccacccacatcacgcctcatcatccttcaggtcttagctcccaccttcctcctcccggaagccgaccctgacgcccagcatgtcccctctgatggggcctttgttctgcagagggaggggaggggctggtgttaggggtggattcctggaattctttttaaaaatgtattatctttagagatagagtctcattctgttgcccaggctggagtgcagtggcacaatcacagctcactgcagcctcgacctcctgggctcaagtgatcctcctgcctcagcctcccgagtagctgggaccacaggcctgcaccaccacatctggctaattgtttaaactttttgtagagacaggtctcactatgttgcccaggctagtctcgaactcctggccttaagagattctcccacctgggcctcccaatgtgttgggattactggcatgaaccaccgcccggccaagtcatagcactctggtggctgctctgactctgctgtccaagcggtaaccacccaccttgcctttggtcattaagttctgtcacttggtccctgccaccctgagatccaattatccccattggagtcaggctttccgattcttgctctgtccacccaggctggagtgcagtggcgtaatctcagctcactgcaacctccgcctcccaggttcaagcaattctcctgcctcagcctcctgagtagccagggattacaggcacccgccaccacacccagctaattgttttgtatttttagtagagatggggtttcatcttgttggccaggctggtctcgaacccctgacctcagtgatccgcctgccttggcctcccaaagtgcagagattacaggcgagagccaccgtgcccaccataatttttgtatttgtaaagagccaggatttcaccatgttggccaggctggtcttgaactcctgatttcaggtgatccacccacttcggcctcccaaactcccactgtaagttctgacctaggaggagcgcgatcgcaacacaacaatgccgtggacacagacacggttgatagagaccagcttgtcacacaatcccaaccctagttcagtcttgtcaggcctctgagcccaagtcaagccatcacatcccctgtgacttgcacgtatacgcccaggtggcctgaagtaactgaagaatcacacaacaagtgaatatgccctgccccaccttaactgatgacattccaccacaaaagaattgaaaatagcttgttcctgccttaactgatgacactatcttgtgaaattccttctcctggctcatcctggctcaaaagctcccctactgagcaccttgtgaccccccactcctgcccgccagagaacaacccccctttttcctttacctacccaaatcctataaaacggccccacccttatctcccttcactgactctcttttccgactcagccctcctgcacccaggtgaaataaacatctttattgctcacacaaagcctgtttggtggtctcttcacatggacgcgcataaaatttggtaccatgactcggatcaggggacctcccttgggagatcaatcccctgtcttcctgctctttgctccgtgagaaaagatccacctgtgacctcaggtcctcagacccaccagcccaagaaacatttcaccaatttcaaatccggtaagcggcctctttttactctcttctccaacctccctcactatccctcaacctctttctcctttcaatcttggcaccacacttcaatctctcccttctcttaatttcaattcctttcattttctggtagagacaaaggagacacgttttatctgtggacccaaaactccggtgccggtcacggactgggaaggcagccttcccttggtgtttaatcattgcagggacacctctctgattattcacccaggtttcagaggtgtcagaccgcgcagggatgcctgccttggtctttcacccttagcggcaagtcccgcttttctgggggaggggcaagtaccccaaccccttctgtgtctctaccccttctccaccttttctagggggcaagaacccccaatcccttatttccacatcccgacccctttcccacttttctggagggtaagaacccccgaaccccttccctccgtgtctctatgctctcttttctctgggcttgcctccttcactatgggcaaccttccaccctccattcctccttcttctcccttagcctgtgttctcaagaacttaaaacctcttcaactcacacctgacctaaaacctaaaccccttgttttcttctgcaacaccgcttggccccaatacaaactgggcaatggctctaaatggccagaaaacagcactttcgatttctccatcctacaagacctaaatattttttgtcaaaaaatgggcaaatggtctgaggtgcctgacgtccaggtattcttttacacatcggtccctttctagtctctgttcccaatgcaactcgtcccaaatcctccttctttccctcccgcctgtcccctcagtcccaaccccaagcgtcgctgagtctttccagtcttccttttctacagacccatctgacctctcccctcctcgccaggccgagctaagtcccaattcttcctcagcctccgctcctccacccgataatccttctgtcgtcctcacacccagggtgtcctcacaccctgtccagcttacagtttagttccacgactagctcttccccacctgcccaacaatttcctcttagagaggtggctggagctgaaggcacagtcagggtacatgtacgtttttctctatcagacctctctcaggtgagtcagcgtttaggctctttctcatcagaccccactaaacatatacaggaattccgatatctaactctgtcctacaacttaacctggagtgacttaatatcatcctgacttctgccctctccccagatgagtgggaaagagtttttctctagcccaatctcacgctgataaccgccggcttcatgagccagacctccaggaaggcagtagagcagttccccgagagggtccccaatggaactatcaggcaaattccccaggtatagctaggtgagattacatggtttcctacctagttgaagggcttaaaaaggcagcttacaaagctgttaattatgacaaacttaaagaaactacccaaggtaaagaggaaaacccagcccagttcgtggcccacttagcagcaacacttagacgctataccgccctagacccagaagggccagaaggccgccttattcttaatatgcattttatcactcagtccactcctgacattaggaaaaaacttcaaaaattagaatctggccctcaaaccccacaacaggaattaagcaacctcgccttcaaggtgtacaataatagagaggaagcagccagatggcaacgcatttctgagttacaattacttgtctctgctgtgagacaaaacccagccatacctccagctacaagaacttcaaaatgcctaagcagcagcagtcaagcattcctacaagacttcctccatcaggatcttgcttcaagtgccagaaatctggccactgggccaaggaatgcccacagcccaggattccttccaagccatgtcccatctgtgcagggacccactggaaggcagactgcccagctcacccaggagccactcctagagcccctaaagctctggcccaaggctctctgactgcttcccagatcttctcggcttagcggctgaagactgatgctgcccgatcgcctcggaagccccctagaccatcacagacgccaagcttcatgcaactctcacagtggaaggtaagtccgtccccttcttaatcaatatggaggccacccactccacattaccttattttcaagggcctgtttccctgccaccataactgttgtgggtattgacagccaggcttctaaaccttttaaaactccccaactctggtgccaacttagacgatactctttaaagcactccttttagttatccccacctgcccagttcccttattaggccgagatattttaaccaaattatctgcttccctgactgttcctggactacagctgcatctcattgccgcccttcttcccaacccaaagcctccttcgcgtcttcctcttgtgtcccaccttaacccacaagtataagatacctctactccttccctggcaaccgatcacatgcccatcaccatcccattaaaacctaatcacccttaccccgctcaacgccaatatcccatcccacagcacgctttaaaaggattaaaacttgttatcactctcctgctacagcatggccttttaaagcctacaaactccccttacaattcccccatttcacctgtcctaaaaccagacaagccttacaggttagttcaggatctgtgccttatcaaccaaattgttttgcctatccaccccatggtgccaaacccatatactctcctatcctcaatacctccctcctcaacccattattctgttctggatctcaaacatgctttctttactcttcctttgcacccatcatcccagcctctcttcgctttcacttggactgaccctgacacccatcaggctcagcaaactacctgggctgtactgccgcaaggcttcacagacagcccccattacttcagtcaagcccaaatttcatcctcatctgttacctatctcagcataattatcataaaaacacaggtgctctccctgctgatcgtgtccaattaatctcccaaacctcaatcccttataaaacaactcctttccttcctaggcatggttagtgtggtcagaattcttacacaagagccaggaccgcaccctgtagcctttctgtccaaacaacttgaccttactgttttagcctagccctcatgtctgcgtgcagcggctgccgctgctttaatacttttagaggccctaaaaatcacaaactatgctcaactcactctctacatttctcataacttccaaaatctattttcttcctcatacctgacgcatgtactttctgctccccggctccttcagctgcactcactcttaagtcccacaattaccattgttcctggcccggacttcaatctggcctcccacattattcctgataccacacctgacccccatgactgtatctctctgatccacctgatattcaccccatttccccatatttccttctttcctgttcctcactctgatcacgcttgatttactgatggcagttccaccaggcctaatcgccacacaccagcaaaggcaggctatgctatagtacaagccactagcccgcctcttagaacctctcattttctttccatcgtggaaatctgtcctcaaggaaatcacttctcagtgttccatctgctgttctactactcctcagggattattcaggccccctcccttccctacacatcaagctcagggatttgcccccacccaggactggcaaattagctttactcaacatgccccgagtcaggaaaccaaaatacctcttagtctaggcagacactttcactggataggtacaggccttttctacaaggtctgagaaggccaccgcagtcatttcttcccttctgtcagacataattcctcagtttagccttcccacctctatacagtctgataacagaccagcctttattagtcaaatcagccaagcagtttttcaggctcttagtattcagtgaaacctttatatcccttacggtcctccgtcttcaggaaaagtagaacagactaaaggtcttttaaaaacacacctcaccaagctcagccgccaacttaaaaaggactggacaatacttttacctctttcgcttctcagaatgctgcagggtacagcctatttgagctcctgtatggacaatcctttttattaggccccagtctcattccagacaccggaccaacttagactgtgcccccaaaaaacttgtcatccctactatcttctgtctagtcatactcctattctccgttctcaactactcatacgtgccctgctcttgttcacactgccggtttacactgtttctccaagccatcacagctgatatctcctcgtgctatccccaaactgccactcttaactcctgaagtaaacaaataatctttgctggcaggactatgctgaatctccttaggcactctctaatcagatgtcctgagtcgtcccaattcttagacattttatacctgtttttctccttctcttattccatttagtttttcaattcatacaaaactgtacccaggccatcaccaataattctaaatgacaaatgtttcttctaacaaccccacaatatcaccccttaccacaaaatcttccttcagcttaatctctcccactctaggttcccacgccgcccctaatcccgcttgaagcagccccgagaaatcgcccattctctctccataccaccccccaaaaaaattttcgccgccccaacacttcaacactattttgttttatttttcttattaatataagaaggcatgaatgtcaggcctctgagcccaagccaagccatcgcatcccctgtgacttgcacgtatacgcccaggtggcctgaagtaactgaagaatcacaaaacaagtgaatatgccctacccggccttaactgatgacattccaccacaaaagaagtgaaaatagcctgttcctgccttaactgatgtcactgtcttgtgaaattccttctcctggctcatcctggctcaaaagctcccccactgagtaccttgtgaccccccactcctgcccaccagagaacaacccccctttttcctttacctacccaaatcctgtaaaacagccccgcccttatctcccttcactgactctctttttggactcagccctcctgcccccaggtgaaataaacagctttattgctcacacaaagcctgtttggtggtctcttcacacggacgcgcatgaaaagtctcatcgtcacagtcaggaacctacacagagacacacaacctataccaaggcacgtgtgacggacaccgccactcagcgacagacacacacaccacattcagcaacaggacacgggcggtgcctccagccacaccgacatccctcaaccactgccctcgaccaccacattccaagtccacaggcccagaggacacacaggggtcagacacacaccaactgcagcccccgagccccgcctgcctatcccctgggtcctcaccccacgacccaggatgcccctgaaccaggggcccctcctgctctgagatgccaacctaccatacacgcaggtccagtggctgcttcctcctctcaggaagtgggggagatatttttagttacaattaacctcccacccaatttcccttctccccaggcacatccaattggtttaattagagatgattaagttaatgagaggcatttccagattctgggaaaagggggaggaggggaagaggagagctgtcccctccccaacttcccagtgtaccagccgctgggaccccttcccagcaccaggcaggggatacactaagcaactgcctcccctctcagccgacctcaaagtcttggcctggccctgcccctcccccatattccttcccccacctgccatcaagggagggtgattgtttgaagtccttcctgctgtccacccatcacccatcccacctgagtcccggggagttttgggagagagaaactctcatcatagtcacgaaaacaatatcaggccaggtgcggtagctcacgccagtattcccagcatcttgggaggccgaggcggctggacggcttgaacccaggagttcaagaccagcctgggaacaccatgaaaagccatctctaccaacaaatataaataattagccaggcatggtggtttgtgcctgtagtctcggctgctgaggaggctaaggaaggaggattgctggagtgttggagtttgaggctgcaatgagctgtgattacagagggagaccctatctcaaaaacaaaagcaatttaaaaaattaaaaatcaggccaggcacggtggctcacatctgtaatcccagcactttgggaggccgaggcaggtggatcacttgaggtcaggagttcgagaccagcctggccaacacagcaaaaccccgtctccactaaaaattacaaaaattagccaggcctggtggtgcatgcctgtagtccaagctacttgggaggctgaggcagcagaattgcttgaacctggaaggaggaggttgtggtgagctgaaatcacacccctgcattccagcctgggcgacagagtgagactcttgtctcaaaaaaattaaataaataaataaataaaaattagaatttcagagaattctattttaagaaaaagaggctggggccgggcgtggcagctcacgcctgtaatcccagcactttgggaggccgaggcggcggatcacctgaggtcaggagttcgagactagcctggccaacatggcgaaaccccatctctacaaaagtacaaaaattagccgggcatgatggtgggtgtctgtaattccagctactcgggaggctgatgtggaagaatcacttgaacctgggaggtggaggttgcaatgagctgagatcacaccattgcactccagcctgggtgagagagacagtgagactccatctcaaaaaaaaaaaaagaaaagagaggctggaagcacagtggttagtgtccaggccctggagccaggctgcctgggttcaaatggagcccagcctcacaatctccagctgtgtgaccttggatgagccacttcacctctctggtcctgcttcctcacctgggaaatggggaccgtgatggcacccacctcctggggctgccatagggtttaacagattcccaggtatacggctcctagaacagagcctgggacacagcacttactgaagggctccataaggtcataaaagtggcagcccatgctctcatcctgtgcctgttctgctttttgtgacactcatccctttcttccttttttgagatggagtctcgctctgtcacccaggctggagtgcagtggcatgatctcagctcactgcaacctccaccttttgggttcaagggattctcctgcttcagtttgccaagtagctgggactacaggcgcccgccaccatgcccggctaatttttatatttcagtagagatggggtttcaccatgttgcccaggctgtgtcctcaagtgatttgcctcccaaaatgctgggatcacaggcgtgagccaccactcctggcctatcctaagattttgttcattcactcgtctgctcagcggatattttctttctttttttcggggggcagagggggacggaatctcgctctgttgtccaggctggagtgcagtggtatgatctcagctcactgcaacctctaccacctcctgggttcaagtgattctcctgcctcagcctgctgagtagctgggattacaggcatgtgccaccacacctggctaattttttgtattttagtagagacggggtttcgctatgttggccaggctggtcttgaactcctgacctcaagtgatcctcccacctcggcctctcaaagtgctgggattacaggcgtgagccaccgcgcccggctgagtgtggcatatcttctgtgcatcctttatgtgtgtgtatgtttccgagtgtgcatgtgcgtatttgcatgtgtgtctgtttgtagcgatgtgtgtctctgtgcaaatctctccatccaggcccaccccaaagggactccgggggtccaggaacacatttttcacggggtccttcaaaaacccacacacgtgccccttgggccttgagcacagagcagcagtgtacgtggttgggggtgcccgagagactcagaggtccaaggatggctctggggagaggatggcaaagggggcgcttggatggcggaggggctgaggggcacttgggagaggggactggaaggcagtgagccaagacgaagcagcccgggtctgaaggaaagagctcacctggcctctgaaggagaagggagggggaggccccgaagatgtgggtttccagtggggaaggggacagagagagacaaggtctgaacaagacagagacagaaagaatggctgggcgcggtggctcatacctgtaaccccagcactttgggaagtggaggtgggtggatcacctgaggtcaggagttcaagaccagccaggccaacatggtgaaactccgtctctactaaaaatacaaaaagtagccgggcgtggtagcgcatgcctgtaatcccagctactcagggggctgaggcaggagaatcgcttgaacccaggaggtggaggttgcagtgagctgagatcccagcattgcactccagcctggtgtgggcaagaaagtgagactccctctcaaaaaaaaaaaaaaaaaaaaaaaaaaaaggtaccagagggagagagacagagccaaacaggggagcgatccacactctgccttggtggtctctctctctggggggtggaggggacagagatctggaaaactgagaaccccaagggactcacactggtttctgagcctcagttttcctagttacaaaggacagcctctgcctgtgatgggcgctgacacacgtggcacagttccccatgtgtccctcgaaatacctccaccatcagcacaatcatcctacgagacaggcacggccgctctccccattctccagatgtggaaaccggggcccagccaggtgaagtcgtaacccgaggtgccatagctgttgcgttccagaggcgagattcaaacccacgtccgtccggaagccttggaagtgagggtgtgcctgcctaacctgctcatttcccatgggacagaggacgtgattggacagccacagctggtgaagtgacgcaggcgtggccctgagtcttcattctcccctgcacacacatctcttgcaggaattctgcagctccctctagttaagaggtggagtcttggccaggcctggtggctcgtttgtaatcccagcactctgggaggctcccaagtagctgaaactgcaggcgtgcaccaccatgcccaagcaattcgtttgcttgcttcgtagagatggggtctcactatgttgccaggctggtcttgaactcctggccttaagtgatccactcgccttggcctcccaaagggttgggattataggcgtgagccatcgtgcttgcagccggccaatcagtattcttattcgtgatttacgagcttcaaattggtaagaatttgaaatcttgggatagacacaagaactccagttggtggctccgtgtttttaagactttatcattaaaaaaaagaagaaattagagaagggaggtaggggggacaggagagtgaaggaatctctccaaaatgtcggatccgggcgaccctccttccctgactgcccagccaccccgtcccttctctgtcctggcggcgaggccctagccgccatcttctggggaccaaggcccaggagcccagctcgggtcccaggcagaggtgaaggcagaagtggggctcagggcctggaggccttgccggtgtccttgagagcccttggatgggcactcaggcccccatgtcccagcagggccctagggaggtaggcattgagcagaggggcctttggaggtggggtcctgaagctggaggaccaggcgggaaccagaggcaggtgtgaggctgggggtcacagccggaggctgggtctgtggagaggggaggagaggccaagtcaggagcgggcagggggcctggccccaccccagcccatctgtgcaggcctcatcagccccaatgtgagggggacacagagagagtggctggcggggaatggcacagggatgtgggagggtcacagagagaagagacgcagtgacgagaaagagggagacagagaatcagagtggaggtgagggagggagagacctacagacagagacagagaacaaggagagagacaggcagagtaggacagagacagacctggagggagtcagagagaacgacatgggaagagagagaagaagtcatgaagaaatagacgaaatggagagagagaaagagagacaggaggctgggcgcggtgactcatgcctgtaaccccaacactttgggaggcagaggcagggggatcgcttgagcccaggagttcgagaccagcctggggaacaaagcgagacccgtctctacaaaaataaaaataaaaattagccaggtatggtggcgcacgcctgtagtctcagccacttgggaggctgaggccagaggatcgcttaacctggggaggtcgaggctacagtgagccatgatcaggagtggagagacagaaaaggagacagaaaggagcagagaaaagagcccactgggcagccaggcagtgggatgagaagacccctccatcactactgaccccaaaggtcccctgacactcaccccagaccatccctacccacacttggccatgaaagagctgagtcgcccactgccctacctggcctggatacgcctgcccatctctctcccaggctcggcctccagcacccgcctccatgcataagccctgtgcaggcctccactctcatccccagggcttttctgctggccctgaattcattagccacctgtccggccgcctgcctcaacccagtccaaagagaacttcctccttgtgtgtagggggctggggctgtctcacagccacgagatttccaagctctcctggccttggcacgtgctattccctctgcagatgctcctctcctgcttcactcctcccattctgctggtctcacctccaaagtcctctcctccaggcagccctccttgaatcctctagtctgggtcagatgccccctcctccaggaagccctctctaaacacctccccccatcccaggtccaacacccgccccctgtgagctcctccagttccttggcttcaccatcccagccctgcccgttctggggcatcaccatctggggatgggtctgtccccttcactagactttgtgccccatgagggcagggctgaggctgtcatggtcactgttgtgtccccaacattacccagcacagggctgggcacagaggggctcaggggatggatggacagatggatgctaaactaaggagttaggactttgtccagatggcactagggagccacaaatggtttaatccagagagagtcaaactctgatctgggctttggaaactctaggctgcctccctaccctgggcctttgcacatgctgttccctctgcttttgtgagcagggtagacctgtgcaagtgacctcttctctctgaacctcagtcttcttatctatgaaattaaaattgttaatagtctcccctttcgggatcgttgtaaggactaaatgagaagatgctctaaagtgccgccatcataccaggccacagaagactcaaggcctgggaaagtcaaataatgccccccttccacattactccctactctgcccagtggactcctattcatccttcagtgccccatccagaggccacttcctctaggaaatcttccctgataccccagagatagctgatgactccctcctatggggaaactacgttttattgtttgaactgttacactggattgtcactggggttgccaacttccccacaagaccagaatcttctcaagatccagaccctacctgaggcatgtcaggatggagtgagggctcaatttttttttttttttttttttagatggagtctcactttattgcccaggttgatcttggctcactgtaacctccgcctcctgggttcaagtgattctcctgcctcagcctccagagtagctgggactatgggtacatgccaccacacctggctaatttttgtatttttagtagagacagggttttaccatgttggccaggctggtctcgaacttctgacctcaggtgatccacctgcctcagcctcctaaagtgctgggattacaggcgtgagctaccgtgcccagccaagggctcagtttatgtttggagatgtatcatagatgaatgggtgtatgtaggtatggatggatggatggatagtgggtggtgggtgggtggatatatggataatgggatgtgtgggtggatggatgggtgagttgatgggtaggtgggtggaagcctgggtagggaggtgggtgaatgcacagataaatgggtagatgtgtgggtggttggtcagtgtggaggtagatggatgagtgggttggcgagtggagagatgaatggagtgagtgggtgaatgtgtggtcagatgggtaatgagtgggtaggtgggtggactaggtttggatggatggattgcgggtgaatgagtaattgagtaacggatggataaagatatggatgggtgagtgagtgggtagatggatggatacatggaggaggaggatggatggatggatggatggatggacggacggacagatggatgaatatcttcccatcaagcctcagagaacccacagtacagggacccaggctgacccactactctggaagtgcccactcttggagtcctgaggtctaatggaggtttgagaattgcacaatccccagcccttagaccctcacacctctcctgcatcagcctctatagataatgccattctccttccaagttcaaactcatccccactgatcctggaagacaaaaaaaaaggagggtaagtgcgtctttcagagacacccccagatgcctctaagtctccctcaccccttcctacaccaggggatccctctaccaggatagactgagtcataagaaggtgctggccctttaagaaaaagtggagccttccgaggtattgggcttgaagtctggaagaaatgaggttgtaaggaaaagatgggggaccaggaaatctgccttggcatcacctgcttctcactaggcaagtgacacactgtattccgcttgaattgaatctcaggtgggcatctttgttttacaggtgggtcatggtgcgcaggggcggggcctagctaagggggcgaggcttacccggaggccggacggccacgtgtggctgcgtctcggtatagcccccgatgggctggccctctgggctgaaggctgcaccctgccctgcgaagggggttcagaggtgcaggctgagccccaggaagcccgggacccggctttgacgccctcctaagaaccccaggctctccgtccccgccttccccctgtacctgtgcggttggattgatcgatcataggttgcacgatgcgtctccgggcgttaatgaacctgggaggcggtcatggaaacggaggggaatgaaaagagggagtgggagagaggccaagacgaacacagagcgggccggaggacagcggcgggggaggcagagcggggcgagcaggggcagtggctctgcggggctcggggcctccgtcagcaccgcggacagcgcccgggctctcgccccgggccggcccgcgggccctcctgggccactcaccagttgttgacttgcaggatggtgagccccgtgtcctgcgccagctgtttcttctgctcctccgaggggtacgggtgctgcagccaccagcaagagtcactctgcctgcctggccggccgcagtctgaaccccaaggtctggcccaccggggtccgggggatggggagcccaggcccaggcagacgtctgggagaaccggcgcttctgagcgtctctgcgctccccaggatggagaccaagggagcctcaggcttggggcaattacatgcctgccagcccccgcctgttccagcaattagaggttaactggccagctctgattagagagactgtgttgggggagggggctcctgtggcgtgggggaggggcttcactggcgtcggggagggaagcaaagcccaggccctccctctctgaatctgtcagagtctctgtgtggccctctccctatccatttatttatttatttatttgagatggagtcttgctctgtcgccaggctggaatgcagtggcgcgatctctgctcaccgcaaactccgcctccggggttcaagggattccccgcctcagcctccccagtagctgggactacaggtgcgcgccaccatgcccgactaattttttgtattttagtagagatagggttttaccatgttggccaggatggtctcgatctcctgacctcgtgatccgcccgcctcggcctcccaaagtgttgggattacaggcataagccaccgcacccagccctccctatccatttctttctttctctttctctcttttttttaaacagggtctcactctgtcactcaggctggagtgcagtggcgccttcatggctcactgcagcctcaatctccctggctcaagcaatcctccggcctcagcctcctgagtagctgggatcacaggtgtgtgccaccatgcctggctaatttttttttttagagatggggtcttgctatgttgcccaggctggtctcgaactcctgggctcaagtgatcctcctgccatggcctccgaaagtgctgggattacaggcatgagccactgtgtctggccctccatttctctctttgtggctctcacattctctctctgactcactatctctgtgtgtgtgtgtttctgtctgtatctctctctctctctgggattcagtccgtccctgcctccgagtttctgtctgtctctgtccctctgtgactcggcctctccctgtctccatcttgctctgacttggtcctccccgaatctctgtgtctctctgttttagcctcttcctggctctatttttctcctctgtccttgaagcagtatggtgcggtggttaaggccagactgcctgcatttgaatccacttctggctgtgtgaccttaggcaagtctcctaacctctctgttcctcagtctcctcctcacctgttaaatggagataatagtagcccctccctccgagggtacactgggtggatggtgggcaggtggatgattgatgcgcgggttaatggacagttttcggggaggacttagtgagttaagtgtcctgagcggcacctgcactcaggtgacactcagtgctgctggctcctgtcacaattctccacctccatgagagtctcgaaaaatttcctgccgtctttctcccacttctgggtttctctggggtttcggtctctgtggtccacccttctccctctctccattcccaccctgcacctgggcagcagggctctcaccgagaggtgctggaacaaccaggctcgcatgatgttggtggccaccttggggaagatccccctcttcttgtttcgccgtcgctcctggtccaagtcctcatcttctccaccagaactgggagaggccacgctggtgtccagcccgtctcctgagggaaggcaggcatgctgtgtgtgtgggtagtgaagagtggaggaccagagggccccagaactctcccccaagacaacactccacaccccagccatctctgcccctctacaagtcttacttgcgatctaacttcaatcctctggttgactcccatgtttcccttccacctcccaagattctcaccttggtcactggagttgtccccactctgggaggccaggcccccactggatggacctggggtccccaaatgtacagacccactatcctcatggtctcgaatccacatattattctagaaaacaagagttagaagttagtgccaaggcggccgggcgcagtggctcacgcctgtaatcccagcactttgggaggccaaggcaggcagatcacaaggtcaagagatcaagaccatcatggctaacatggtgaaaccccgtctctactaaaaatacaaaaaattagccgggtgtggtggcatgcacctgtagtcctagctactcaggaggctgaggcaggagaatcgcttgaacccgggaggcagaggttgcagtgagccgagattgcgccactgcactccagcctgggtgacagagcaagactccgtgtcaaaaaaaaaaaaaaagttagtgccaaggctttgggcatggactctggagctaggactcctggatgggaagccagtccctgcctccttcctagctgtgtgatcttgggcaggtcacttccccactctgagcctccgtttccttaactggaaaatgaaggacaggaccaggcacggtggctcacgcctgtaatgccagcacttttggaggctgaggcaggcagatcacctgaggtcgggcatttgagaccagcctggccaacatggtgaaaccccatctctactaaaaatacaaaaaccaggctggcttgggcacagtggctcacacctataatcccagcactttgggaggccgaggcaggcggatcacctgaggtcaggagttgaagaccagcctggccgacatggtgaaactttgtctctaccaaaaatacaaaaattagctgggcatgatggtgggttcctgtaatcccagctactcgggaggctgaggcgggagaatcgcttgaacccgggagggggaggttgcagtgagccaagattgtgccactgcactccagcctggccggggtgacaaagtgagactacgtctcaaaaaaaaaaaaaaaagaaaaaggaaaagaagggccgggcgcgatggctcatgcctgtaatcccatcactgtgggaggcccaggcgggtagatcacaaggtcaggagatcgagaccatcctggctaacatggtgaaaccccgtctctactaaaaatacaaaaaattagctgggcgtggtggtgggcgcctgtagtcccagctactcgggaggctgaggcaggagaatggcatgaacctgggaggcagaacttgcagtgagccgagatcacaccaatgcactccagcctgggtgacagagtgagactccgtctcaaaaaaaagaaaaggaaaatgaaggacaataatagtcctgacagtgtgtggccagtattcaatgatgagtttgtctacacaggggctcaaacaagatgaccttacacaggtctatggcatcttatctaaaatccttggggcaagaagtgtctcaggattccgaacatttcacatttttatctttatttttagtcagtgtctcactctgtcgcccaggctggagtgtagttgcatgatctaggctcaatgcagcctctgcctcccaggttcacgtgattctcatgcctcagtctcccgagtagctgggattacaggtgcctgccaccacacctggctaatttttgtatttttagtagagacggcgtttcaccacattggccaggctggtctcgaactcctgggctcaagtgatccacccacttctgcctcccaaagtcttggataacaggcgtgagccactgcgccaggcccatttcacatttctaggcaataaatcagcgcatacaccatgcagttcgcaaccatcctaggcagggtctggggcacaacctcgtcatcaaactcatgaacatttccatagcaacatggatgagtatttaactaagtggaataaataaaggctataaatagcccctcattagttcaggtcagcttttgctgccaaatgagtttgcactaaatttatgggacaaaatccaaaactttgaagtttcagagattctggggtctcagaattgtagctaagggggtctggggctgtattatctttttcttttcttttttttttttttttgagacggagtctcgccctgtcccccaggctggagtgcaatggcatgatctcagctcactgaaacctatacctcctgggttcaggcgattctcctgcctcagcctcccgagtagctgggattacaggtgtgtgccaccatgcccggctaattttttgtatctctagtagagatggggtttcaccatgttggccaggttggtctcaaactcctgaccttgtgatccacccccctcagactcacaaatcgctgggattacaggtgtgagccaccgtgcccggccttatcttttttttttctttgaagagacagagtcttgctctgtcacctaggctggagtgcagtggtgcaatcttagctctctgcagcttcaaactcctgggcttaagcaatcctcccgcctcagcctcccaagtagctggaactacagttgcgcctggctaatttttcttattttttgtcgagatgggatttcacagtttgtccagactgctctcgaactcctgggctcaagcaatcctcctgcctcgacttcccaaagtgctgggattacagccatgaagccactgcagccagcctcacagtttctttatgcaaactccaacacactttgaggaactcaacaatcgggtaggatttaccctctacccagatctgtgccccaggaggtcagctcacccatatggactgcagtaacagttctttgtttttcagtttaacgttgggttaaatctgccaagtggttttagattaactgtattcttctaccaaaaatcttagccgctgtcaagcaatctgctcctctctccagttctggtgaccacgcctcctcccacccttcttttttttgagacagagtatcactctgtcgcccaggctagagtgcagtggcgagatctcggctcactgcagcttccgcctcccgggttcaagtgattctcctgcctcagcctcccaagtagatgggactacaggcgcacgacataacacccagctaatttgttgttgtttgtttgtttttttgagacagagtcttgccctgtcacccaggctgaagtgcaatagcgcgatcttggctcactgcaaccttcgcctcccgggttcaagcaattctcctgcctcagcctcctgagtagctgggatcagaggtgcgtgccaccacgcctgtctaattttttgttttttttatgtttagtagagacggggtttcaccatgttggcctggctggtctcaaactcctgacctcgtgatctgcccacctcagcctcccaaagtgctgggattacagtcgtgagccactgcacctggcctaagttttgtatttttagtagagccgggtttttgccatgttggccaggctggtcttgaactcctgacctcagatgatctgctcacctcggcctcccaaagtactgggattacaggcatgagccactgcgcccagccatcaccagtctacattttcctttctgtgactgcagtttgaaggtttggttgtcctgtttgtgacactgttgttgcgattcctgtgcgagtgggtataaggctccaggacttggccggctgcagtggctcatgcctgtaatcccagcactttgggaggccgaggcgggaggatcacttgaagtcaggagttcgaggccagcctggccaacatggtgaaaccccgtctctactgaacaaaaattagcccggtgtggtcgtgggcacctgtagtcccagctacccgggaggctgaggcaggggaatagcttgaacccaggaggcagagcttgcagtgagccgagatcgtgccactgcactccattccggtctgggtgacaaaacaagactccatctcaaaaaaaaaaaaaaatgtctccgggactgtgtctgggtgggtctggctgtggcgtggtcgtcataggagtgtatctgaggtggtgtggagtgggtgtgcgtgtgctgtgaagatgtcattgccaggtgtgttcacagtaggattgcctgagtgtggctctcatgcgacttctcaaggctttgcccctgtactctgtatggagctgtggcaagtcgggatccacacggctgtgctgtgtgtgttttccgtctggtgtcctaagtggataaaactgtagtgaggctgcgtctgagatggtgccaccttactgagttgctttgctgggtttgattctttttttttttttttgagatggagtcttgctctgtcgcccaggctggagtgcagtggtgcgatcctggctgactgcaagctccacctcccgggttcatgccattctcctgcctcagcctcctgagtagctgggactacaggcacccgccaccacacccagctaattttttttttttttgtatttttagtagagacggggtttcaccgtgttagccagaatggtcttgatctcctgacctcatgatccacccacctcagcctcccaaagtgctgggattacaggtgagagccaccgcacccggcctgggtttgattctttgtggccgcatctgagcctgtgagtctatttccaagtctgcgtagatgagtctggggccatgtggctgtgagtggtgtgtgcgtgtgatctcggctgcagcccgactgtgatgtggccagggtcacgtgtgtgcaagagggcaccgtggtcagtccgggcccaagtgtggttatatctgagtttgccgggcagtacctggggctgtttggctctatgtccatctgtgtggctggagcgggtgtgtgtatgcagtggacacatactcaattgagaacggcgtgcggaacccggctgtgtgttctatgctgctgtcgtatggctgggctggggggcgtgtgtgagtacccggtggacgctactgtctggctgtgagcagaaatggctgttgctgagttggtgtggctgtatgtggacctgtgtgggtgtagctgaatctgtgggtggcatctgcagccgctggtgtgcgtgtgtctgtgcactgttgcccagccgcatccgagtctgcgtagctgttgtgtagtgggtgtgtggctgtgtgcatatgcgtgccctgtgatcaggctgactgtggcttcgtctgaggctgtgtagtgcacatgcgccctcatgcggtgtccaggcacagctgtggctgcaggacgatgcctggtgcccgtcccgggcccacctggtctgggaggctggggcaggaggctgggtagtcctcgaagtcctccctgcagccgccgtcccgatcctcgatgaccaggtcgatgggcatctttcccttgaggcaggtgatgtagcggtgacagaagttgtcgcacaggtcgtggacctgggggggcaccggggtactggggggggccacccacgggggcagggcgggggtgctcagggacgggggcggcattctgcttcaactccggtggggagagagctggaaggtggggggcagaggcgacgagagggggtgggatgacaggggcaagtgagggtgtggggaggtgagacgcgctcaccttctccagctccagcaggtggaaccgcagcacctggatggcctggatcatctgaaaacgtgggcgggaggtggggggagacagagggaattgggggagggagcagggaggaagaaggaagaggaagagaaggaggaagaggagacacagagaaacagaaagagtgagacaaaatgacagggacagggagatgcagcaaagagagacaaagacaccaggtgcaagggggaaagagagaacagagatgcagcccagaattaaggaaagagcagatgttagattgagagaagcaagagacgaaaaaggacccatcacaagcggggagagctaaggtgagccatgctgactggcattcccatcctctgcctgttggcccccagctccaggccccacccacctgcaagctacatttcccagaacacttgccaaagggtttggccaataggaagccctggcaagagcttggggagcaaaggatgggagaagctgggtattcctccctcctttcttctctctctctctcttttttttttttttttttgatatggagtcttgctctgttgcccaggctggaatgcagtggtgtgatcttggctcactgcaacctctgcctcccaggttcaagcgattctcctgcctcagcctcctgagtagctgggactacaggcgtgcaccactgtgcccagctaatttttgtatttttagtagagacagggtttcatcatttggtcaggctggtctcgaactcctgacctcaggtgatctgcttgcctcagcctcccaaagtgctgggattacaagcatgagccaccgcacccggccctctttttctttctttctttctctttctctagctctctatgagagacagggtcttgccctgttgcctgggctggtatgcagtggagctgatcaagggtcactacagcctcgacctcttggggctcaagcgatcctcccgcctcagcctccaaagtagctgagaccacaggtgcatgccaccacaccccgctaattaaatgtttttgtagaggtggggtctcgctacgttgcccaggctggtctcgatccctggcctcaagctatctcctggccttggcctcccaaagtgctggcattacaggcgtgagctgccgcacccagcctcctctccttgggcagcagtccctgcgctcactttggcataggtgctgatcttctgacggatggaacatcagacactttttgagccctattctgtgccaggtgctgttccacgcacttgaatcgcattcactcattaaacccccacagcagccctccaagacagacattactaccagccacacttcacagacgggacaccaaggcacggagatgcagagtgacttgccctgggtcacagagctggtgagtggcagagctgggatttgaactcgggccatgggtcccgttctcagactctaggctgtaccacacggcacgtgggcaacaatcatgacggtttggggacatggaccaggtggccttctctctgcaccccccccaccaaccccagggatggggcgtcagggaaggagacccattggaggagggggtgtgggggagggctcgggtctcaccagattgtccagttctgggttggaggagaagaggggcctctcagagcgaacctgggagggaagagagaggccggcagggggatgtcccgccttccacccacccctcctcgctggctctctgactcggtgtgtggtgggtgggaggtgcccacctgcttggcaaaggcagcgatgtcctcgttgaaggaatcagaggagcagacgtcacctccagggggtgtccccagcccagctccggccccgtcacggggagagcatgtagccagttcacatttctcaaagaccagggccaagagggggaagagcgggtgtctggggaggcaggaaaggagagaggttgagggagaggctgggaggtggatggaggggctgccaagatgcagaacagctggggaggggacaagagacccagagagggaaggagacagagactcgtacacagagagagacagaagcagacccagggagcaaagaagcagaaagacagagagagagagacaggagcctgagacccggccccactcacccatagatctcatccttctccctcttcaggccgtcgctgtccaagcctgggggcaggggctggggaggccggtgcgggccatagggccctggtactgcgggcactgtctctgggaagctagccagggctgcggggccatccacgatgcctgggtagtgcggcagctcatcatactgggggaaggtgagaagagaagggcggagccccagggaggggtcagcaccccgagactcggctgaggagcttctctatcctggaacccaggagatgcccttctgtgtcccagaaacctgcctgtggtccccaggtgtctgagcccccaagcttgaagccctccaggtcccctggagctgcctcggtggggagtgaggaccccgtccaggcagagattcctgacatgtgggcaggaggacccagagggagagacggcagggtctggctgggagggaaaagagatggagaaagtggcgtgagaagacagtgacagagacagagagagagacagacagagagggagatccatggacacctcctgtaggaaccgcgcattgttgtacacaaagtacacatacgaagcctccctgtcttctatttcatttcacagttggcagataagcgcatcagagtaagtctcaacaacatgtcacactccactcgccacgtgaatctaccacacatgtagacacagccatacacaccaacccacgtgcacactcatgtgtcagtcacacccaaatccccccccccacacacacatgcacacacacatgcacacagcccaacaccaggcacaagaatgaatgcatgattgagacatttggcacatggatgaatgaatgaatgaggcatttagcacagggcctggctcatgctgtgagcacttgttgccggagagggtcactccgcaccaccatacagacacgattgcgcacccaagagaaacaccattatggggtaggacgaccgcgtcctgtcgtcacagaaccatgcacctgggaagccaggggcaccttcctctcatcaggtcaaatcccttcctcagtgatgaagacacggaggctcaaagaggcagcaggactcgcacgggaagaggctagaacgttcctgcctcggaccctcgcctggctgggcaccctggttctgtgtgtcccactctttccctctccctcttctcctaacttctcctgtgccctgaagttgaatccaactgctccccgctgctcaaggcactctcaccaaaagcggtcctcacagcctacccggaacccccaaaacgggcgcgcgcctcctcccctgtcttctatccccgttcccatccccagggagacaggctccgtggggccagcagcctggtgagaccacctctcccacccctgtcccactcctagccctggagaggcaggggcggcttggaacaaaagtagagcgaagggaaggacggaggagagcagaaaaaaggggggacggtgaggtgcgggcggctgagatggaggaggaagcccaggaacagaggagagagactgcgggtgggggagggcagagagagggggatagagaggcagaaagaggggggagaccagggacagagagagggggacagagaggcagaaaggaggaggagagtggggcagacagagggggacagaggggcagggagaaggagaagctaaacgatggggaggaggcgaggccgagggccaggaagagacacttgggggcagagagggggcacacagggactgggagacccaggggcggagggaggggcagagagagagcgaggtggtgtagaggacggatgggctaatgggggccagcgccggagagtgggggatgcagggacagggggtgcggaagcggccgggacgcggggtccccgccccgagacctaccctccgggccatgggctgaggccggcggcagctcctgggtccctccagagcctggccgcgggggagggcgcagcccggggccgcagcccctgacggcccgcggtgttgacgccagggggtgggcaggaggccaggcgcgcgcccccccacccccgccgccgtcagcggcaggcgccgggccgggtggggactccgcgcatggaccccggcccccgcccccagcgggggtcacggccaggagcgcatcgccgccggggcgggggcagcaggcgcaggcggggcgcccgaggccccctcctctgggccccccccgtcccttccccggctctggagggaatcgaaccgtcccgagacggacacaccggggaccgcagggggcggggggcggcccggggcgacggagggtccggcggcggctcaggggtgctggcagccgcgctccccgttcccggtctctcccttgtcttgtggaaattaaacagaaccaccaaggagcgggataggggatgagccagagtgagcctgcagagctacagcacgagggattggggttagggcagcagcagcacttccggtgggagtcggggaggggcaggctgtggggggaggagaggaagagaccgcggccctggtgcccccaggcccctcctctcctacccagggctggggttcctgctccgggtttctcagtctccctctttcccagtctctctctccttgtctctctctgtctccgcttctcccgtcctttctctcctctggctctctgttctccgagccccctggacacaccacggaccccctccctggccatctccaggggtcacgtgggaatctggagtctggtcccaccgtaggctctcccctctctgaggctcgattccccctctgcaggatgggcagtgcgctgggggcggcgggggtgggctgtggataacggagaaacagttaagctagagggtgccaggactcagggtcttggctgagtctgggggtccccatgccggcgggctctgcccccgtggctgtcctgcggtgaggctggccgtttaaggcagtccgaggggaagggtctggaggccttgcctttcctcaaggccggcgcaccccagataggggttttggagcagaaaattaatttaaatcactttttaattaaagacacaaggccctttggtctgctccacccccacctcaccctcagccaagacttggggtgagggatgcaagggttaggagtctctggctctatttgcttttttggggggtggtgcatgctaaggtccccttagcccaggctgattctgaaacctagaggagcaagtgcggcctcatctgacggccagtggtggggggcgtggacagagcaggaagggagggagggggcacctgggatggggatggggcctaactggagtggggagggaggtaactccagtgacggtgtgattcagagagagagagagacagagacagacgcgggtgggaggagagagagagagaggtgcagacagagtgagacagacaggagggggagggagtgggggacaggagctccaatagagaccctggagtcgtccctgccacccccaaaacaagagcagggggcttggactctgaagcataaatctttctaattaaagaaagagacgagctgttgggaagggagaaataagtgtgtgggagagaaattgattgggggaggatggaggatgccggcgggggacggagggagcaggggggaggctccggctttctgaggctcttcctccagtctttccctctgtctgtccatccgtctgtctgtccgtctctgtctctcgctctctctctctctctctcacacacacacacacacacacacacacacactctctctctctctctctctctctctctctctcttcctggctgtctcccttaaatagtcctgggacccttctgttcccagggggagggagcaggtggcggccaggcctggtgctggagcgggggtgcctgtgtcactgcgtcgcggctgcctgtcggctcttcgagggtgtgcttgggcctccctgtgacagtgtctggaagcgtcttccctgcccggctgagtggctccctgggtggcatcagagtgaccccagctcccagtctgcaggggtctccgccctctagccctgtcctgcacctgttttacagacgggaagcgtggagccctctatgagtagatctgggggacctcatgggtctccccagcacgggctgggcgatctctcagcggactggcccttcagtgccccaacctgagcaccgaccactggggctatgcccaccaggcagccacgtcccccggggatccgcagtggtccccaggatcccctctgaaagcctacaggagcagaccgaatgaacgaggatccaccttgggttcctcctgtcctctctctcgggcctgctagcctcctgcctcggtttcccctctttatcaaccgctctgtgtctgtctctctccttctgggggcccaggtttgcttcctcctcctcattccaggctctctctgagaatctgtgtctctgctcaggagggtgggggaagaagggaccctaaaagacaggccgtctctgtctccatctccgcctgggctatgtctgtctgtctgtcacctgggctgtgtctgtctgtctgtctcctggctttttttttttttcttgtatctctgtgtctctttgtctggatgtcttctctgcctcatctttcttatctctctttctctccatctttctcggtctctctctccaggggcctctgtctcttctccctccttcctctccctctctccgcctccctgtcccccccaccgtatcctccctgggcttctgtctccctggctctctcccctctcctccacccgggcccttcataaatacatcgcccccttcccgtcctcccgctgcctggcccagctccaggagaaggaaacatttatcttggtgggggcgcccacccctgcgcccgcccctccgcccgctggccacgccatccatcacccgagcccagactcctgtggctcattcgtcaccggccctgacaaatgcctgccgcccccttcccctcccgccccaccaagcaatcataccattagccacggctcagcggtggcgggaaggacccggcctgacccgggcggggggcggggcacaggctgcggctcccaccgagacccctctctccctcttttccttccctttctatctctcctcgccctctccgtcttttttgttggaatctgctttcctctgccagtttctcgctgtgcctctgggtcctgtctccggtccgtcctcctcctcatcctccttttcctcaccctctctccttctctccttctgtctctgtctctctcttactgagtctctttccagttctgactctgtctctgtgtctctctataactgtatctctctgtctctgcccgtctgtctctccctctctgtctctcatctctctctgtctctccctctctgcctctccatctctctctctgtctctccactctgtctctccctctgtctctccctctctgtgtctcttcatctctctgttgctccctctctctctgtctctccatctctgtctctccctctctctctgtctctccatctctctgtctctccatctctctctgtctctccatctctgtctctctatctctctctgtctctccttctctctctgtctcttcatctctgtctctccctctctgtctctccatttctttctctgtctctccatctctctgtctctacctctctctccatctgtctctccctcttgctctctgtctctccatttctctctgtgtctctccttctctgtctcttcatctctatctctccctctctgtctctccatttctctctgtctctctctttctgtctctccctctctctccctctctctctgtctctccctctctctccatctctctctgtctctccctcttggggtctgtctctccatttctgtctgtctcaccatctctctgtctctccatttctctctgtctctgtctctctctgtctctccatttctctctctgtccctccctctctctctgtctctccatctctctctgtctctccatctctctctgtctctccctctgtctctgtgtgtctctctccctgtctctccatgtccctctgtctgccatgggctctgtcggcccagccgtgccttttaaatctctggtctctgagagtaccctcggcgttggcctcactggctttgtgtgctgggaatggggtgagggtcttgccctggcgccctgggacgcccgccccgccccgctccccacctcgctctcctccctggtgctgtgttctgagtctctgggcttcctccgtctgcatcttctctgcatcctgtctgtatctctgtctctgctgcctctccggcccctgtgttttgttcttggctctctgctccctctccaacttcccctcctctttttgtgtcccttctccacctcctccaccgtctgtgttccccctctactgaccccacctacccctttcaatccaccacccatgacattcccttccccgcacttccccagggagagaattgcagggagcaggcagggaacgggaggcaaaggtggcgagaaggagagagtgaggaggtaccttgggaggcactgaagcctggagcctcatccctctctcctttggccatgtgtgcctggaagtcctccctagtgtctgatttcaatcctcagggggacggcagaacgtggaggagatgccaggtaccaacccttcccgattccctgggagaggccgaggagggagctgggggcatcagaccaggagagagggcaacctgggcacagtcagtgctgtgctggtggccacccattgccttactggaagagggaggtagtgagacccccgttctgggaagtaatcatagcagaggctgtctctgacccactcataccacctaggacccaacagcatctctcacgctggcacctgcgacccttccctgaatgctttccagaccagggtaggaggcgctagaagtcagcacccctaaagaggtcctgggccaccatcagacaggagttagtggatacataacccaaagtcttcaggtggggaactccagagttccctgagaggtccccagcaggatggagacctcattgtccacagggtgacctgctcattcaacactgcctttattatttatttatttatttatttgagatggagtctcggtctgtcacccaggctggagtgcagtggtgtgatctcggctcactgcagactctgcctcctgggttcaagtgatcctcctgcctcagcctcccgagtagctgggattatagccacctgccaccgtgcccggctaatttttgtatttttagtagagatggggtttcaccatgttggccaggctggtcttgaactcctgacctcaggtgatccgcccaccttggcctcccaaagtgctgggattacaggcgtgagccaccgcgcccagccttcaacaccacctttaatggttttctttcccatctccctccagtgcctcctgggatcacctcacaaataaactatttccctcccatccttgctgtgggctggcttctgttggtgctcagcctaagacggtggccagcgggggcatgatggatgggcagagaggaaacaaagggaaaagagggacctctcgtggtggtgaatcatatgtgtctacgtggctaggctgtgctgccctcatgttcaggcatcagcctagatgttgctgtgaaggggtgtgtgtgtgtttgagacagggtcttgctctgttgcccgggttggagtgcagtggtgcaatcttggctcactgcaacctctgcctcccgggttcaagcgattctcccacctcagcctcctgaatagctgggactacaggtgtgagctaccacgcccagccattgtaaaggtattttaaaaatgagattaatagccgggcgcggtggctcactttgggaggccgaggtgggtggatcacaaggtcaggagatcgagaccattctggctaatgcggtgaagccccgtctgtactaaaaatacaaaaaattagccgggcgtggtggccggcgcctgtagtcccagctactcatagtcccagccactcgggaggctgagccaggagaatggcgtgaacctgggaggcggagcttgcagtgagctgagatcgcaccactgcactgcagcctgggcgacagagccagactccatctcaaaaataaaaaaaatgagattaacatttaatatcgattgactttgagtgaagcagattgtatgggtgggccttatccaatcagttgaaggccttaagactgaggtccctccaggaagaaggagttctgcctccagatgacttttaggttttgcttgggttttgttcatttgtttgttttttgagacagggtctcactctgtcacctaggctgcagtgcagtggcatgatcatgactcactgcagcctcaaccttgtgggctcaagtgatcctcccaccccagcctctggagcagctaggactacaggtgtgcaccacgatgcctagataatttttatttttagtagagatggggtctcactgtgttgcccaggctggtgtcgaacttctgggctcaaacaatcctcccaccttggcctcccaaagtgctgggataacagacatgagccaccacacccggcctgggaggctaatatatattcatttaatccccacgacaaccctgtgacataggtactgttagcatcatcatcacgcattttccagatgagggaactgaggcacagagaaagtcagccgctacactatgctgcctcccaggacaatgttaatcactcccaagctgaccccatagagctctttgcatccaggtgagaatcatgaccttcggggtgaggtgacgggacaggtgtgaaagtcctcatgttttccaagcctcaagctctcaatgtgtctctctttgcagctgagaccttactcatcttcctgcaccaagactctacaccccctttgtttgcatttgttaagatgaaggtgtcccagacctggcacgatggttcacgcctgtaatcctttgggattacagtagttcactttgggaggctgaggtgggtggatgacctgaggtaaggagttcaaaggagtttgagaacagcctgggcaacatggtaaaacctgtctctactaaaaatacaacaattggccaggtgtggtggcgggcgcctgtaatcccagctacttgggaggctgaggcaggaaaatcgtttgaacccgggaggtggaggttgcagtgagccgagatcgcgccattgcactccagcctaggcaaaaggagtgaaactccatctaaaaaaaaaaaaatttgaaggtgtcccttgtcccattctacatcgtggaactcatcctgtcccatctttgcccttctacctgtgaaactttgggcacattgcttcacctctctgagccttagtttcctcttccgtggaatggggtgatgtatagaactggcaataggtttaagcagatcatgcttgggggggtccccatcactgccagctgctgttagcacaggcctcccttgctttcctgtgcccctgtagtcaatgccctctactgctcctccagcaacctcccctcctcacatcaggactctccagagagtgatctacatgccctgactcaatttccccacctcccactgcagatcagtgcaccgtctgcccctacaccttccacaaacctgttctcatcaaggcctaaagccaaaggtcgatttttttttttttttggtagtggggagacagggtttttctctgtcactcaggctggagtgcagtggtgcagtcctagctcacggcagcctcgacctcctgggctcaagcaatcctcctgcttcagcctcctgagtatctgggactacaggcacatgccaccacgcttggctaacttttaaagtttgtggagacacgaggactcgctatgttgtccaggctggtcttgaattcctaggctcaagcgacccttctgctttggcttcccaaagtgctgggattacaggcgtgagccaccatgccgtgggcctattgtcttaccttggacttcaggttgggtgcggccggtgggaggaagtggcaggagactagcaggtgggagcagaatgaggtcgaggtgcttactctcccggcgccccgctatccccagtgcaggttggtgatgcctgtactcttctactctacagactcaggtccccaggtctctgcagcctcgggtgcctctgctcaccccttctagcccaggtatggcaactgctccctctgctgctagccctggggtactacaccttccctcgttttccccaaccctgcccactcctcagtagccctttcacccaactctccctggctactccgtttgaatgaacacaccacctctctcctgccaagatgcactccctgaactccctcacgcagccccatccattctctctctcaaccactcccttctcaccatcgccctcccaccctcctactcccctctcccctcgtctgctgcctctgtccctgctccagccttgtccctggtctcccagcccccagtagccaggaggaacgtctcataaaataaatcaggtgatatcaaccgcctgcctccttcccccacttaaatcccttgcaaagctcccctttactcttaggatatattccaagctccctagagtggctgataaagtctcttatgatttgtcctcaagttcactccccacgcaccccatacctcgttcatgataaccatttccagggctctgaaaaagccattatctcccaactctgcacacctttacacaggctgtgtcctttggcacaacacacacacacacacccctcctcctgtaggatctgagaaaattacttgctttatttaggaaaccccatcaaccccagctctttggctcaggcaaatgaacgtctctcttttgtgttcccaggatgcccataaagagaaacagtttgtggctcatgcatgggggcgtggctagtggaagcccctgactgaagcaggaaggcgtggctgaagcacgactgataagtgggggtgtgattagtggaagagctaggctgatgaatgggggcgtggttagtggaaacccgtaattgacggatgcgggcgtagcaagtggaggagcttggctgatgaatgggggcgtggttagtggaaacccacgactgacgaatgggggcatggagagtggaggtgcgtggcttgtggaagcccatgactgatggatgggggtgtggctagtggaagagctaggctgacggatgggggcgtggctagtggaagctcattactgatgggggcgtggcgagtggaagagcttggcggctggaccccggcgctgctgctatatgtgggtgtgtcccgcagacgaccgcgggccgcaaaaacccagattacttggtttaacagttgcccaaatctcagtcagagaccttattagccccctcctcctgaatcccagcttcccacgggactgtttttcaggcagaatttcaaagttttatggcaacttttacagaaatcacagaaaagagacagcgactgatgatgagctgggggagagaagggtagtgggtaacgggtctgggatgttggggctgagcacaacaggacgatagaatgctgaaaacctgtgggaagcagaaagttatgggggtagttgggtcatcctaggggcccaaggagtgggtggcactgcccaaatgtgtcctttgggcaggaaacatcaacagtaagaaaatgcagatggcctaccgacagatggaaggcctccaaagttaaaaatgcccacccagatcccttggcccagtcccatccccccacccatccccaccccccatcaggcagagatgtggcagcatttgctggcttgtagcattggtcctctgggaccctcggtctcctcttcgagggtcctgcccggattggctggcactgagggcaaaaggaaccttccagattgtcaggggagatcaactggactcgctttgattcccggcctcctccccaaagctggttctcatggctgagggagtctgctgccctctcaaaagttgtctgtcacccccttttcccaagacatgcaccctcccgcgtcccccctcccccaaacacactatatacacacacaagcccctccctccaaggcgtggctgggctctcagaggtagtggagggcgagtgggggagctggaatgtctgaagttgcaggttcaaaatgtgcttcctccggctaagccctgggactgaaaccccaaacttctcccctcgtctccgagcctggagaatgagtgtcctcccaagaacccgagtggagggattggaaggaacggtgtgcggcctccttgcgcgcacacccacccgctcctccccgccggggctgagcggagctccctgagggctggggggaagggctgggagctgagacggcctctgacagcctccttcgagggtcccccagggagggtgggttctgaggctctgggacatggggtgaagtggggggggggtcactaggggaagggagactttgggggcaaagccaggctgggtgaccaaggagagagaccttaaactccccaggatggttactgggggtggttccctggggaggggactggggtggaaatttccccagggatatagacggtcaccaacaggatgggctggagttggggtcaccgcaggggaggaaccggggaggctcccgagaggaagagggaaggctgagctactggggacacagaacagggcaatcaaagccaggggagggggcggagaagggaggccgagtcccaggagaggaggccgagtctggggggaaaaggagaccagggtccaagagcaggtgcagccgagtccctagccccgggcgggcggtggggacgagtctctgcgcgaggccctagaagccccggatgtggcagtacgcctccaggctggcgaagaggatgtacaggagccagaggcccaggaagagcgcggtggtggcgagcttgggtccgcgcgggccgcccagctcgccgccgatgtgcggccggcgccggtacagcagcacggcaatgcccacgaaggcgaagacggtgaagagcgtgacggagaaggccagcgtgccagtgcgcacctcgaaggggcggccctgcaccgcccagtacacggcggccacagaccaggcgacgcccaggccaaggaacacgttcaccgcgttggagccggtcacgttgccgatggacgcgtcggcgcactggtcctgcagcgccgccaccttgctggcgaacgtgtctgcgaggcagagacatacaggtcggaggggctttgcgccgccacccacaggggcgggcatccgcctgccccctcccagcctttcccggtcgcctgctttctgcgggcagtgtgggctcaagacccctgacccccacccaagaggcaaagtccatcaccacctttaggcctgctcgccactggaaccgctgccggctttctatgggacctgccgcctgctttctgtgggattcattctcttctatgggactcactgcgtgatttctttttttttcctccgagacggagttttgctctgtcacccaggctggagtgcagtggcgtgatctcagctcactgcaacttccgcctcccaggttcaagcgattctcttgccggagcctctgagtagctgggattacaggcgcccaccacgccctgctaagattttgtgtttttagtagagacggggtttcaccatgttggccaggctggtctcgaactcctgatctgaggtgatccactcgcctcggtctcccaaagtgctgggattacaggtatgagccaccgcgcctagctgtattttttgtttgttttgttttgagacagggtcttgctctgttgcccaggctggagtacagtggtgcgatcatggctcactgcagcctcattttccccagctcaggtgatcctcccacctcagcctcccgagcagctgggatcacaggcatgcgccaccacgtccagctaatttttgtatattttgtagatacggggtttcaccatgttgcccaggctggtctcaaactcctgggcccaagcaatcctacccctgccttggccccccgcctttgcctcccaaagtgctggcgtgagccaccacaccccacctgccccctcatcttagttaaaactctgaggtttggccaggcgtggtggctcacgcctgtaatcccagcactttgggaggcagaggtgggcggatcacgaggtcaggagttcgagaccagcctggccaatatggtgaaaccccgtctctactaaaaacgtaaaaattagctggatgtggtggcgcacgcctgtagtctcagctgctcaggaggctgagacagaagaatcgcttgaacctgggaggcagaggttgcagtgagccgagatcacaagatcactgcactccagcctgggtgacagagcgagactctgtccccacaccaaaaaaaaaaaaaaaaaaaaaaacaaaacccaaaaaaaccaactttgaggttcactggcctggtttctgtcatgtcccccaacatagttccatggactcttctgtctggtttcttgcgggatgggacatcaacagcttgtttctatggaacccactgattggcttctctgacaatccccaccgtcttcctaggaacccctctccccacagctgtctcttccccaccctgccaccttctctctatgaaatccattgtctggtttctagcatttcctgctaccttagttttatgggaccttctacctgggtgcttttggggaggattcaattcacatcttgcacctaggggacccgctgcctggcttctattatgccccacctccgtatttctctgagacccaccacatgggcgctgtgtgactccacccacctcattttggcaggatcctgtgttgcccctgcctggctcatctgagatcctaccccaccaaagtctcccagggtgttaccagggatggaggtgcccagggcaacgaagacaacagcattgacagagtccttgaggccaacggtgcagccgaagtgggaggcgaggtccccaatgagggcggtgagcaggccgatgaccaggatggagacaccaaagcaggcccagccgtggcagtactcggtggggggcacacaggcgaagagcaccttccagaacaccgtcaggaagtgcatcacgtagtcaaagcacgacggcagccgctcctcccgggacccgtcctcctcctcctcctcgtcccctgtgggcacacgacccagctggggcatacactcagacttccttccttgcctacagaggccccattttgtctaacttcctgacagcaagtcccattgaatgaacttctttcccagaatcccttgcacctacctgtggccaagtcaactgctaaaaacagttactttcccagaatcccttgaagctaggagcttgattgggcccaggtgaaaaatatttactttcccagaatcctttggatctaaatatggctaagtcagcagtaaaaacagttacttccatagaatcccttggagctaggggcatgactgagtccaggtaaaaaaattttactttcccagaatcccttgcacctaagtgtggccatgtcagcagctaaaaacagttactttccctgcatcctttgaagctaggagtgtgaatgggcccaggtgacaaatatttattttcccagaatcccttgcacctaaatgtggccaagtcagcagctaaaacccattactttcccagaatcccttgaagctaggagcatgaatggacccaggtgaaaaatatttagtttcccggaactgcttgcacctaaatgtggccaagtcaatgctaaaaacagttactttcccagaatcccttgaagctagaggaagccacatctgcccagctaaaaacatccagttccccaagaccgtttgctgccagggacagccatacccctagctaaaattattcattttcccagaagccttcacagctgctgaaagccagtccacagctagaagtattcacttcctcagattcactgcagctaaccagagccacagtctccactaaatgtactcactttcccagaatcccttgcagctagagggctatatacccagccaaaattaatcactttcctagaatcccttgagactagcaacagctatggcctcagataaaaatatggtattcactttcccagaatcccttgcagttggcagttgccatgtccctggctaaatacttgttttgccagaattcctcctgtgagtgactatctgacccagtctgccaatgagatataaacagagggtttctggaaagccctggctttcctgatgtgggcattgggttacagatgtgttttctgagctttgtaaatgatgcctcatgcttagagctgtatcacctattgtgacctaatttgaccagcttttgacctgcagtgacttttttttttttttgagacagagcctccctccgttaccaaggcagtagtgtgatctcagcttactgtaacctccgcctcctgagttcgagtgattctcatgcctcagtctactgagtagctggaatcacaggtgtgcaccaccccacctggctgatttttttgtatttttactagagatgggatttcgccatgttggccaggctggtcttaaactcctggcctcaactgatctgccctcctaggcctcccaaagttttgggattacaggtgtcggccaccgtgcccagccgacctgcagtggcttttataacctgaaagccctaaggcagtgttttgtttacctcaccctaagctgattagtataaagcaatgaatgagaatcaatgagcacacttgtgtgtggcacgcattacatctggaaggatgctcatgagaacgaacgtagctcctgaccagtcactgctgaacgcatccctaactgatgtaagacatggctgaggtcagagcagggaggccacgctctttgggagagaggtggctgctattaccgcatcactatgtcagttgaggcttctgcctgccctgcttcaaatccttccttggttcttgtactaccttcaaacccaggcccacatgcctaggcttggcattctgcggactctggcctcagctgacttccccagctgctcccctctacagggaggctcgtggttatgcctgtcactctgaagtcacctctctggtgtccaaccctggatccactgtgtgatcctgaatcagtgtcctcacctctctgggcttctgggtgcctatctgtgataaataattggacctgcttcatgggaaacttgtgatgacagaatgagttggttcatgtaaagtgctgtcaacggtctcggacacctccagcgttattactgttgtttcgattgttatgattgaaggccttttttggtgcctgggggaaattcaaagatgctccatgccaagtccagcccacaaggagcttacagtaggaagggaggtaaaggaagtacaaaagctctgcgacaagatgggacccgactcatctcctaagggagtgaggactacccttctccctcacccctccagcagctctgtgctcgcacagcaaagaaccaaaaggcacgtgctgaacaaagtgcaaagtgaccaagctctgatccagacactgaggatacattaattaaaatgagttcacacaggaaataaatttccaaccatgcctggcactcaagacacgatagggtcagctgggcacagtagcttacacctgtaatcccagcactttgggaggcggatgtgggcagatcacttgaggtcaggagttcaagaccagtccggccaacatggtgaaatcccatctctactaaaaatacaaaacttagccagacatggtggtgggtgcctgtaatcccagctactcaggaggctgagtcaggaggatcgcttgaacccaggaggaggaggctgaggaggctgcagtgagccgagatcacaccactacactccagcctggatgacagagactacatatctcaaaaaaaaaagacatgatagggtcaccgttgtcataatcaggattattattacagttattattattgttatgttgttattcttcctccaccccgatctaatcacctgatctaaccacctggtttctataaacccacagcacgatgtacgctgggtctctacgaccgccacctcccacctcgtttcagttccgcctcatcctccgtctccactaagtccccagaggaaggaaatgctccgaagctcaaagagccccttgccatctccccgttgttcgtggaatgaacctcaaaggagcctctgcagggcccgtctcctgctagtttcttttcttcgtttttttttttttttttagacggagtttcgctttgttgcccaggctggagtgcaatggtgctatctcggctcaccgcaacctctgcctcccaggttcaagcgattctcctgcctcagcctcctgagtacctaggattacaggcgcaggccaccatgcccggctaattttgtatttttagtagagacggggtttctccatgttggtcaggctggtctcgaactcctgacctcaggtgatccacctgcctcggcctcccaaagtgctaggattacaggcgtgagccaccgcacccagcctctactgctagtttctacagcctctacccacaccctctccactttcctcccacaagctctctctagccccaggggcttcccccattcaaaaccctccatggctccccagtgtgttcaaatgccacccaagctccctactgtggtccacaaggagcagtgtagaaatgtgccgatttccagcctcatcctggtacctcttcctcccgcccaacaccaggcacccacccaaaaaatgtgccataatctcgcacactccagggcttctgtgcttggctctccctctgcctgaaacactctccctgtcttctccctcctcctggctgacatctttacccatttgaagactcagctgggaagccaccccctccaggaagccctccctgactttcaggctgggttaggaaccgcatcagggctttcctccgggtctcccatcccagccctgcctactctgggttgtctgtgtcttgtgacatgtctgtctcctgcactgggctgtaagctccatgacagggccagaaatcacttctgtgtccctggcaatgtctcacatagggtcgggcccagaagatccctcagaagtatgtcagaagaatgtggcttcagagggagatgccactttgtttctactgggcaaacagtctggtgtttctaggactgctgccttgtattttcccatccccttaagcctggtttctttggatcctgctcgcccagtttctttgcaaccacaattccatgtacgccttcagtccccaagagctggggccttaaccctgatgttatgtaagagattgaagccctgagctccgacctcgggccttttctggactccctgtgggacttcaggccactccctcctctgtctctgagcctcagtctccccagtccatatcacaaagggccagtgttggcttccaagaccgtcagtgggtacaagtgtcgtagtgtctctagccacaagggggcagtgtgggcctgtctgaggccaaggagggtggtgacccgcgcaggtaggaaagagctcggtgccctggtgactgtctccagggcaacggaggaacccaggctctctctggggtggccacaccatttaatctgttcccaccctcctgatgcctgatgctgggagaaagcccaggctgggaaccctcccggttcagcccagagccaaacacaaaccctcccagccgctccagccaccacctctcccttctctgccctttctgtatcctcatctacctgcctctccctctccccggcccatttcagtttgcaccgttcattctgtctcatgtcttctccatgtctctctgattctccctgtgtatttctgtgtgtctctctctcctgcttgtattttttttagagacagcgtcttgctctgttgcccaggctggagtgcagaggcacgatcatggctcattgcagcctcaaactcctggcctcaagcaatcctcccgcctcaccctcccaaagcgccaggattccaggcatgagccaccgcgcccggcctgtttatctttgtgcctgtctctccattcatttctccccctttccctgtgtctctgtctctccatctttctctcttctctctcctccctccccacttacctgcgctcaccgtaattgcctctaaaaactgctccctccatgaatgggtcccaattaccaaggccaagttcgttttcttgatgagtttatccaccgtgttctggggatgagagggtgggggagaggtcactgcccctgagcgaaccagggaagctccatgttgggtcctgggtcgggggctcacagcctgtgcccaggggtcctcaactttccacacccccgttctgaaggcaagcaaggaaaagggaggcatgtgctgtccgtggtcctgacgtgggacccttctttggcttgatcttaggaaccttgtggctccccgctttccggaccctccccaaggaaatgaaccaggctggactccaggaaggtgaggccccggaaaatcaccttaaaatcatatgactcctcgatgatgacctccagccggcagttctccccaagaactggcttgcccatctctgctatcctccgagcctcctcctcctcggctgttagcttcctgtccccatcccctgcagcatgaggggtgggggttagactcctgggagacctacctaattgggcctgtgacgcctttactacctgtccccatagttagagaaagcctatctgttctcctctgggaagctccttggtgactcctcccagcctcccacctgaccaccgtctccttcaaccctgaggtccagctcccaagggttggttcatgatctttagttggtgggctctggggttcgtatggtggaggctgtgagactttaggcaatacctgagcctctctgtgccttagttttcataactgttaaacgggcacaataattagtacctacctcatggggtggttgtgagacttaaatgagttaattcgtgtgaagtgcttagaacagtgcctggcacacaataaatattcaatacatgttactatctttattattatcaccaacattatcatcatcgttgccaccctgataggggaggcctggtctctacatccagtttctggaaacatcctagagtgtggctgacatggtaaggaaaggggaggacatccgattttggcacaaatcttggaaccagacccacctacatcctggtcctgagctcgcttctctccccaaagtatgctgacccctgactccaagcccagcagcagcccaaccctaattctggtccctaactctgagctggactctcactgtggccccaaatggaagcctgtcatcaacactgactccaaaccccaaccctcagccctggatctgacctcagcacaaccctagccctaaaccctaatcccgactctaacattcaccataacctggagcatcaataaccccaagccaaatcccacactctatctccagatctaactccagtcctacacctgacctcaaacctcagtcccaactcccaactctgacaccatcactcatgaggagcttgaccacacggcagaagctgaagtgtgttcacctgaacctgtttcctctccttcctgggcaaagagctgaactacatttcccagcctcccttgcagctgggcgtggccacggcctgagttatggacactagaatgtgggcagaagtgatggtcagtccctccaggcttagcccccgaaaacctcccatgtgagcctcgaaactctcttgccctgttcaccagcagcaaacccagccacaatgccaaagctccctggcacagtggagtcacaagatggaatggccacatggcagaagaaagccacccaccaactaggaacactctcgtaaaactttgcctgagaggccaggtacagtggctcatgtctgtaatcccagcactttaggaggccaaggcaggtggatcacctgaggtcaggagttcgagaccagcctggccaacatggtgaaaccccatctctactaaaaaatacaaaaaaaattagctaggtgtggtggcaggtgcctgtaatcccagctactcgggaggctgaggcaggagaatctcttgaaccccggggggtggaggttgccatgagccgagatcgcaccattgcactctagcttgggcaacgagagcaaaactccgtctcacaaagacaaacaaagaaacaaaaaacaactttgcctgagcaagaaataactttttttctctcttctccctccttccttcctttcttccttccttccttccttccttcctcccctccctccctctctctctctctttcttacttttctgagatggagtctcgctctgtcacccaggctggagtgcagtggcacgatctcggctcactgcaacctccactttccaggatcaagtgattctcctgccttaggctcctgagtaggtgggatcacaggtgcccaccaccatgcccggctaatttttgtatttttagtagagacagggtttcaccatgttggttaggctggtcttgaactcctgaccttaagtgatccgcccgcctgggcctctcaaagtgctgggattacagacatgaggcattgtgcccagtaaagaaataacttttattgtgttaagcccctgtgacttgtcggtcagtttgttatagcagcttgtattgcttcctccaacgaatacaatctttaatctaactctaatcctaaccacggatcccaattctgatcttgactccaaaatgactttgtccatctccaagccactgaccttagccctaactcttactccaatctctgaccttggccccaattctaacctaaattcctcaaactctattactcacctcaaagtccaactttagctttgacctaaatctgactctaattctaatctgatcccaccagcaggaaagcacctccactgtgactctcaccttaacatggtcctaaccccgatctccaatccaaaccccacctcactcctaatcaaccccaaactggattctctctgacctcactctcacaaacccagatctgattgtatgacttacaaccctgattacagacataatcttttgagatggagtcttgctctgttgcccaggctggagtgcagtggcaccatcttggctcattgcaacctctgcctcccgggttcaagcgattctcctgcctcagcctcccaagcagctgggattccagatgcctgtcatcacactcagctaatttttttttttatttgaggcagagtttcgttcttgttccccagcgtggagtgcaatggcgcgatctcggctcaccgcaacctccacctcccgggttcgagcgattctcctgcctcagcctcctgagtagctggaattacagttgtgtgccatcaggcccggctaattttgtatttttaatagagacggagtttcaccatgttggtcaggctgctctctaactcctgacctccggtgatccactctcctcggcctcccaaagtgctgggattataggtgtgagccaccgcacctggcctcacccaggtaatttttgtatctttacaagagatggggtttcaccatgttacagacataatcttgacctccaaaatgctaactgtaatcccaaactcatacaggcaccaccaactctcaggccagaccccactgtcccccagccctgaatctgcctttatctcacctccaatctgcctcaaacccaacctggaagagtagctttggggctgggaccctcccccaggccctcttccagtggctcctccccactcagagcccagaggtgacttcactcaccttgattgagtagcagagctggggagagacagagacaggcagacagtgagatcagttccccacgaagctcaggtccacgagctttaaggagtgcctgcaattgagcccctgaaagtcccccgaccctggaccccttacttctcccacagcccactggtcacccctcacctgaaatccctcgcttaagccactggggctggcccagctcaatgaagaaattatcctttttctcatattcctcgtcatcaactatcttcacctgaagagttttcctgtgcagggggtaagggggaggcagaacactcagtgtaaggccccctccccagactcaccaggcaaccctcctggcagccacccagttttccaagcacctcctctgtcccagactccacaatctcatttacttctcaccaccacgcagggaggaaggctctattatcatccccatttgacagaaacaaaaccaggcactggtgaggaagctgagtctgattaaagtaaagcattctgggtgcggtggctcatgcctcttatcccagaactttaggaggctgaggagggagggttgcttgaggccaggagttcaagaccagcctgggcaatatattgagagcccatctctatttatattaaataatttattttaaaaaataggccgggcacggtggctcacgcctgtaatcccagcactttgggaggccgaggcgggcggatcacgaggtcaagagattgagaccatcctgtccaacatggtgaaactctgtctctactaaaaatacaaaaattagctgggtgtggtggcacatgcctgtagtcccagctacctgggaggctgaggcaggagaattgcttgaacctgggaggtggaggttgcagtgagctgagatcatgccactgcactccagcctggcaacagagcgagacaccatctcaaaaaataataataataaaaaaataaagcaaagcggtatgagctcatggttgagacaggatttgaacttacaactgtcagaatccagactgttaacccctgcactccagcccagccactatggtctcctacctagattactagttgcctgctaaacaatcccatgcttcagcctcaccgcccacagtctgttccttcaagagcagccagagtgatcctgatagaaccaaagtcagaccgcattcctcccctgtgcaaaacatttgcaaggctcctatctctcacagaatgaaagtcaaagtccttaggatggcccacaagaccccctgcaatctagcactcattccctttctggcctccttgctattccttgaacaagccaggcctgctcatgcctcagggcttttgcactggctgttccctctgcctagaacactcttcccccaggctcccttcctcagttcttcattcaaacttcaccttctcaatggggcccacttcttccatcttatttaatagtgaaatccctcactgctccccctccagcactcccttatactgctctgttgtctttctttttaatgtatttattattatttttggagacaagatcttgctgtgtcacccaggttggagtgcagtggtgcaatcatagctcaatgcagcctcaaagtcctgggatcaagcgatcctcctgcctcagcctctcatgtagctgggactacaggtatacactaccatgctcagttaattttttattttttgtagagatggggtctcaccacattgcccaggctggtcttgaactcctgccctcaagtgatcctcccatcttggcctcccaaagtgctgggattacagatgtgagccatggcacctggcctgtcttctttaaatatcaccttctaacaccctctaacatttatttagtttattgttcgtcatttaccatttgcttccccatctttaaatttaagttcccccaggtaagttcatttatgttttttgttttatctccaacacccagaacagtccctggcatagagcacaccctccatgcatattttgctaactccaatccttcagcacagaaaaccctcagcttcctgctctctgtcccaaccagatctggagagttaaccaagtgctgatgctaactgattttctcagcatctctgctcctatggtaaccagggggtggcaggaaacagccagaagttacctgtcaccttcaggcacataatccacacccctcgaccccaaagacccacaaacccagaatgcccacagctttgccactggcaactctttaggctgtaggaaccatgtagtcccacaaggcctggccccagaacccaaaaacacaaacacccagcccacacagtcacccaatcgaggaagcacagccgatcacaccgcccacacccacacgccatcacaccctacagccattcccactgcagtggcaagactgcatggaccagatgcccgtcagttagcacgactcccccaccacagccttggcgacatcgccaccctgcagcccctcactgtggtaccacgtagacgctcctaccttatatctaactcctgacgcctcttggtgtctctgtttacttccttcagtgcctctctgcatctctgtccctacattttccatcttcttttctctctctgcctctctcagcttctctgggtctatctctccatctctgactctgtctctctgactctccagcagtctctctctctgactctgactctctccgttctctgtctcagtctcttctcatctctctgctctccctttttttgaaacaaagtctcgctctgttgcccaggctggagtgcagtggcataatcatggctcactgcagccttgatctccagggctcaagcaatcctcccacctcagcctcctaagtagctggaaatataagcgtgtgccaccacacctggctacttttaaattttttatagagacaggatctcactatgttgcccaggctggtcttgaattcctggcctcaagtgatcctcccaccttggcctccccagtgctggggttacaggtgtgagccacagcacctggcccgcccttctttatctggattcttctctccctgtctctgtctttcagagtctaaagaatggagtaacaaaagtcaacacacttcaagcagaagagtttcaatcaggcagtcattcaaaagacgcatctcaacacacaaacacgcacaagacacagcgacacccgcgcaaggacaggcgcacacaagacggccatgtggggacatccgcccacctccaccctcctggtttcaggatattttcaattttctgtgggtggaaagaaagggccgcccccgacctcggcgtgggctgtgagctgtccgcggtgctgaaatgctggggccggcgaggagggagggtctcccgagacatgctcctcacacaccctgacacacacagacagctgccgacacagtgacatgctgacagggtgacacacacacctctgtcgctcactctcgcagacatgctgcgatccgctgacacacagtgactgacgtgcagtgacaggcacgtcaactgcgcctggcaggcgcaccctcaggggacccaaatgcaggagaaacccaacgcgcaggaaacagcaagagggactcgagctagaccaagacaggacttcctgagatcaaaggaagcagatttcctccccagcctgcccccttgtttcctgaaaactccactctcctgcccttctcccctgccagtctctgatctcagacccagtctcctcatcctgtctctcactgacccaaactcccttttctctctgcagcatcgtgagaacctctccttccctgggtcagtctctctcctccatgaatgtctttatcgcgtctccatctctctgcctttcagtctccctccatctcagctttcaatatccacctctctccctccctcaaagcatctctgtctctgtgtctcttcctttttttcgggggtggggtgggtgggagatggagtttcgctcttgttgcccaggccagagtgcaatggcgtgacctcggctcacagcaaccttcgcctgctgggttcaagcgattctcctgtctcagcctcccgagtagctgggattacaggtgcatgccaccaggcctggctaatttttgtatttttagtagagacggggtttcatcatattggtcaggctggtctcgaactcctgacctcagatgatccacccgtgttggcctcccaaagtgctgagattacaggcatgagccaccgtgcccgacctctaagttcctgtctttctgtgtctctgtctctctgttctgtctctgtttctctctccagttctgttattctgtcttcagctctccctgtgtctatctctgtgtctctgtctctgtctctcatgctctccctgccaccccatctctgggtgtctctcctccatctccagcccagctgcttcaaagcgcctctaattagtgcctgcccatcagaggaaggaagagtttccctaaacactaattagcctcctgttctctgtcttctgaagccacagctgggagcttgtgggggtgggggacagagggtgtcccagcctggggaagccatgtgggggaggacagggccgtaaggttgcagcagcaggagggaagcaggttggactataagaaggaccggaaaaagcagaaagaaaactctccattcccccatctcttggtgtgagagaggggtctgggatggtgcctctcgcagcccccaacccaagttctcaacaaccctcagacagagaccaagccagacagagagagagaaggaaaggtgtggagtgtgcctgaaatataagctgagtcagagagcgaggtgctggggacagacagctgcagatgaacagagacgcagagacccagagagagacagcccagggagtgagagatgcagagatgcagagggagagacggagagacagcgagagcagtgagaagctgagtgctgcccgaggcggaagcgcagaggctgggaggaggagggagggggagcgcggtggggactccgcttgagtaggaggcgcgtgggcggcacggaggagggagacagacgggcatgcgggggcggaagagagcgggcagaggaggggcaggcgctgcctgcatcctgggcaggggggtgggggaatgtgaggcttcaggcacacattgggggacactcggtcacctgtgtaaggggtggccagggatctgggcgtgagaacagccctgacttaataatttagtgtacgtgtccgtgattttatgtgtgtctgcgtgttttttttctttttttgagacagggtctcactgtgtcgcccaggctggagtgcagtgggtgatcacagctcactacagcacctaactcgtgggctcaagccatcttcctgctttggcttcccaagtagctgggactacaagtgcacaccaccatgcccagctaattttaaacaatttttagcagagtagaggctgatctccaactccaaggctcatgccatcctcccgcctcagtttcctaaagtgctggcactacagacatgcgccaccactaattagaaaaattatttttagagtaggagtcttgctatgttgcccaggttgctctcaaactcctggcctcaaatgatcctcctgcttcgtcctcccaaagcgctgggattacaggtgttgaccaccacgcctggccctgccgtgtgtgtctatgtgtgtgtggtgcgtataaatggctttgtgtccaatctgtaaacgtctgtctacatgtgtgtgtctgagtgtatccagccagcccacctccccagaccccattttcctaaatcccagccctcaggctccccagtgtctccccaggccctgccctgccttcccaggcccccagattccagcaccatcttttcccaaatcctcgcccagattcgcgttaggtgccccgctatttccccaggttcttcctcatacccagaagccccaccccttccctagctccgcgcgcccaggccccacccatcttgttaggccccgccttcttccgcagcccacatccattttcccatttcctgatgtcgtatgtccaaacccagaccccacctatcgccctggacccgccccctctccacagccaccgacagcgtctcatctccacaagcctctccccacatctccctgggtactcttcagcacacactccacgagctaccaattaaggccccacaccgctctccccaggccccgtcccatctctcctcacctcgtccccccttcctccttggggccctcttctcacctgtccggccacccttctaggcctcgcctcttcatttcacagtcacaaccccaccaggccccgcccacgtggtagacacagcacacctaggccccgcccctcccgaggccaagcccactttggagaacgattcactcaggcccctctcctcctgagggcccagctgttcagtgaagccccgcccacgtcgtgggcatgggtcacaggccccgcccacgttgcgggcacggccacgcaggcccctcccctcccgaggcccaaccaagacccgcccactatgtgggcatggctcacccaggccccgcccctgagccacatcaggcctcgcccattccgaagccccgcccctctccgggccgcctcgggcgtgctcacatggtctcgtcgtcgccaaactccagctctccgcacgcgtcctcgtagtgcacgccgccgccgcgcgccgtgccgtccaccgtgcggtagggaaggcgcacggtgccgcgcgcgcccgagctgcgcacgacgcgcacgtccacggtgcccatgcactcgctcacgtgcagcaggcggtcctggaaggagaagatgcctgcgtggtcgtcgtccaggatggtgacggtggccagcagcggcgccaccagccgccccttgggccgcccgccgccgtccggctcgaacatgccctgcgcgtcgcccacgcgcaggttcagcagccgcacgaagaaatgctcgtcctcctcgaagatgtcgtcgtcgatgatgccgatgcgcagctccttctgcgtctcgcctggtttgaacaccagcgtgccctcgctgcggcggggtggggagggggaagagcggggtgagggtcggtcatcggctgtgtgttgtacggggggagtctggacgtgcttcccagaggagacgtaggtgccatagaagaactcccaagtatgagggtcgacaggcattaaacaagtaatactgagggtgaatcggggtgggcgtcctggaggaagggctgcagagcgggaacaagacagagtgggcccctccccgcgtggaactcgtgaagagcagaaggtgggaattaaacaggtaatgataaggttgagatcagggcaggcttcctggaggaggcattagcaggtgggcatactccaggcagaaggaacagcacatgcaaagtccaagagttgagagggagcctggggtgttctacatccctgcttctcaaaccttaatatgcatatgaatcccctggtggagcttgtgaaaatgcagattctggtttagaagctcccgggtttctagaatcgcatttctaacgagctccaggggatgtcctggtcacattttaagtggcagggatataggacccagaaaggactctgtcattcctctgataaaaacccttcccagatgcccccaagaggaagtccatacaccttaacttggcatcactcattcattcaacaaacactcctaagggcacccgttgtgtgccttgtgccgagtggtgctggggacacagcagtaaccaggccctgtcctcacagggttcacagccccatgggagagccatatcaccatgacaattgcacatttaatgatttaattacggttcattcattcaacagataactgaccgttgtgtgccaggcattgttttaagtgttgggggaacggcaccaataagaagctttgagattctgttttagtgcagaagaatgaacaataaacaaacacaggatgtcaggtggtgatggtgctatggagagaaacaggagggtagggagtgaggagagggagctgttggcatggtcaagaaagccttttggaggaggtaacatttgagcagagacctgaaggaggggagggagtgagccatagggaggatgcctggaaaagagttttttgttgtgttttgttttgtttttttgagacagagtctcgctgtcatccagactggagtgcagtgtctccatcttggctcactgcaacctcccctcccgggttcaagggattctcccacctcagcctcccgagcagctgggactacaggcgcctgccaccatgcctggctaattttgtgtacttttttgtagagacagggtttcatcatgttggccaggccggtctcgaactcctgacctcaaaagatccgcctgtcttggcttcccaaagtgctgggattacaggcgtgagcaaccgtgcctggccaaaaagagtatttttggtaaagggaacaggcaatgtgaatgctctgacctgggactggacagccggacaggggacaggatctgacttagggacgggtcacctcttcgaggaactgcagggagaccagcatgatgacagcagagggagccaggacgagagggtggaagatgacatcacagtgggaacgggggcagatcacctagggcctgggtgggccacggtgaagacttctgcgtttaccctgagtgaggaaggagccctgtgaagcttcgttccgagcagaggagggacacgagctggcttggtgttaaaagagtaacagttgtggaaatctctgaaacacccataagatactctgtaatggggggagccggggagggaacaaggcagtgacattagattactcagagtgaaattctgaggggtcatggagtaagtggactcttcctggcagggctgcagacatcagcgtgactctgggatattaagaaatcttgaaaatctatcatttcccccaatccctcctactgtgcatgtaaggggctcagcaccatctctgaaccctgctatgtgatccatatgcattcactatcactttcatattaaaggggttctggggccgggcgcggtggctcacgcctgtaataccaacactttgggaggctgaagtgaatggatgacttgaggtcaggagttcaagaccagcctggccaacacagtgaaaacccgtttctactaaaaatacaaaaattagtggggtgtagcagcgcatgcctgtagtcccagctactctggaggctgaggcatgagaattgtttgaactggggaggtggaggttgcagtgagccaagatcacgtcactgcactccagtctgggtgacagagcaagactccgtctcaaaaaggtgggggcggggagtcaggctccagttttccagctctgtgggaggaagagagggaccgcaaggttctggcaagaggtagggggcatagaacctggtgaaaagacctgcagtggagggatgagggagtccctcagctcaggattcactgtccgtggtgatggagcacccaggagggtgggctgacctgcttcaagcccagtttggccaccatgccagctgtgtgatcttgggcggtcaggattctgcagtcctctgagccttggtttccttatctgtggaatgggctaataatagtgtttacctcctggcgctgtggtgaggactgaattgatacaggggaagcacccagaggcacagttagctagtgatatccacatattaatatcataatcttagagtcctaaaagtcatgggatatgagacatttacatgtaagggataaagggatcagtaaaatatggagattgtagcactatctttttttttttttttttttttttgagacggagtcaccctgtcgcccaggctggagtgcagtggcacgatctcagctcactgcaacctccgcctcttgggttcaggcgattcttctgcctcagccttccaagtagctgggattacagatgtgtgccaccatgcctggctaattttttgtatctttagtagagatggggtttcaccatgttggccaggctggtctcaaactcctgacctcgtgatctgccagcctcggcctcccaaagtgctgggattacaggcataagccaccgcgcccagaccttttttttgtttttgtttgagacagggtcttgttctgtcatccaagctggagtgcagttgcacaatcccagctcactgcagcctcgacttcctgggcttaagcagccctcctgcctcagcctctcgagcagctgggactacaggctcgtgccaccacatctggctaatttttatacttttggtagacatggggttttgccatgttgcccaggctggtcttgaactcctgggctcaagcaatccgctggccttgggctcccaaagtgctgggattgcaggcatgatccactgcatacatcctgtagcatcatctttgccaaacaattaatccaaagatttagcaacatctttaccaaacaattaaactgggcatcacagtaatggacgagtggacatcatgttcctcctgatacaatgcacccagggggatagagcatcgcttgcatgggattcctgccaaaagtgcaggactccaatcatcaggaagcattagacaaacccagattgagaatcattctagtaactggcctatcatcttcaaaagcatcaggtcacaaaagtcatgggaaggctgagaaactgatccagactgaaggagactaaagagatttgacagggaaatgcaatgtgtggttctggatcaaatgggaagagagggcaggagtgaaaatacagccatcaaggatattacagggatgactggggaaatggaaacacgggctgtgcatcactcaattgacgttgagttaacagtatcaattcagtgttagatttcttgagtgagatcatagtattgtgattaggtaggagaatgccattattctcaaaagatgcatgctcaagtatttaggcatgaaggtcatggtatttgcaactcgtggtcacagagtgtcacaattattgttattattttattattattttgagacagattctggctctgtcatccaggctggagtgcagtggcacaatcttggctcactgcaacctctgcctcctgggctcaagcgattcccctacctctgccttctgagtagcagcgactacaggcacatgttaccatgcccagcttatatatatatatatatggagagagagagagagagagagagagagagagagagagagagagagagagtgtgtgtgtgtgtgtgtgtgtgtgtgtgtgtgtgtgtgtgtgtgtcttggtctgtctcccaggctggaatgcagtggcgcgatcttggctcactgcaacctctgactcctgggttcaagcaattctcctgcctcagcctcccaagtagctgggattggactttagaagccaggcatcagaatcatagaaggctagattcacaggacttatgtttcagcactggacacagaatctgagaagataaaaatcttaaagccatcaagtcagagactggatagggtttggattagaataccaaaatgttggctggtcgtggtagctcatgcctgtaatcccggcactttgggaggccggggtggatgggtcacctgaggtcaggagtttgagaccagcctggccaacatggtgaaaccccatctctactaaaaatacaaaaattaaccaggtgtggcggtgcacacctgtaatcccagctactcaagacgctgaggcatgagaatcacttgaacgcgggaggcagaggttgcagtgagccgagatcgtgccactgcactccagcctggtcaacagagtgagatgcagtctcaaaaaaataaagaatatcaaaatgttagaattctagaatcttagaacttcagacccttagtgtgtcaacatcataggggattaaatctcagaatcttggaaaaactgtgctgtttagggttctcagagatcacgtttagtttggagaaactaaggctcacaggtgtgaacctgtgggaaacttagaaaaagaaaaaggctttccttcttcaagacacttatttccataagtcagaaaactcttataatagaaatgcaaatctacaatgtccactatgaagagagcttcctcagatatggtggttttatgcagtgcacagcttcaacaactgtacatggcagacctgcctgctcagactgaggcaggaacttgcccaaggaacagggtccagggctaagctcggagtggaacccaagtctccttcctcccagtctttggcctaaggtaccttgataaggcaatgccaggcctcgaatgtcttccaggataggaaatcaaggaaggataggaagatgttgactcttcttagccctttggttccagcactgaacagcatttcctccttcacttcaaacatcttggtcctggccaggtgcagtggctcacacctgtaatcccagcattttgggaggctaaggcaggtggattgcttgagcccaggagttaaagaccagcctagacaacatggtgaaaccttgtctctacaaaacataccaaaacaacaacaacaacaacaaaaacaattagccaggcttggtggcatgtgcctgtagtcccagctatattggaggctgaggtgggaggattgcttgagcttgggaggcggaggctgcagtgagccatgattgcgccactgtgctccagcgtgagtgacagagtgagactctgtctcagacaaaacaaaacaaaaccacaccagcctgggcaacatggcaaaaacccatctttacaaaaaatatataaattagctgggcgctgtggtgcacacctgtagtcccagctacctgggaggctgagatgggaggatcacttgagtccaggaggttgaggctgcagtgagctgtgattgtgccactgcactccagtctgggtgatagagcaagaccctgtctcaaaaaacaataaaaaacaatcttggtcctgaggtcatttgtaagtgacaaagtgggctgttatcccaggaggtgacacctgtactcacttccttctgcaaagcctcagggctctagatggggacagtgcggaccaggggtgggtaggagtggaaaggtgaaaagatagttgaaagcaggccccaatatggtgaatgcagttccctcaactgagggcatgtggatgatatggtgcactgggagaggatggaccgagtggccaaagggatcccatgctgcagggtgatggaacaaagacctgtgaacagctgcattttgttttgttttgtttgagacagtgtctcactctgtcactcaggctggagcacagcacaccatgcacctgtagtcccagctactttggaggctgaggtgggaggatcagtttagcccaggaggtggaggctgcagtaagccaggaaggctggggtgggcagggtaggaaaggtggatggagatgggcagacaaaaggatcctggactgactgaggtggagggaaagacctgcaaatgtccaagcgctggaaagagaagtgatgagggcagagagggaagaagactggctacaaaaagcagccaggcacacagtggtggaactcaagatcgatgaaacagagaactgccaggtgcggtggctcacgcctgtagtcccagcactttgggaggccgaggcgggtggatcacctgaggtcaggagttcaagaccagcctggccaacacgatgaaaccccatctctactaaaaatacaaaagattagctgggtgtggtggtgggcacctgtaatcccagctacttggaaggctgaggcaggagaatcatttgaacctggaaggtgaaggttgcagtgagccgagatcgtaccactgtactccagtctgggcaacaagtgcgaaactctgagaaaaagaagaaaggaagagaggagaggagagagtagaggagagagaggagagaggggagagaagaggtgagaggagaggagagaagatgagcgaactgagtcccaggaagagaagggttaaagggatgagggattggctgctgcttgatggcagaaccaaagatctgggaacagttcagcctcagctgtaccccagggagaagattaaagggggatgtgtcaggctactgagcaggtagaacctctgaaaagctcagccattggccctctttctccctgtctcctgatttatttttcttcacagctcctaccactacctggcatttttatgtaatcagtgtttacttcctaactgcctgtctttcccaggagaatgtcagctccatttgggccgggactttatgagttttgttcaccactagtcgccggtgccagatctgtttgtttcttgcacatagtagacacatgataaatgtcattatgggaaaggggagacttgtgcatgaattaacaacacatactgttcaaagcatgatgtaggctggtgaaaatcattgaaaagaacatactgtaaagctataagtcttaaaatagtgtgtcatggacagaagaactacaaatagatgaattttgtgggccacatgaggacagagatcttatctatcttggttattgttctaggttgatcccctaaataaagacatctggcacacagtaggtgctcaggaggaactgttgaatgagagaatatcacagatttgcaaggagaggggtaaggagagggactggggctgtgagatatggtagagggtgatgggtgggttgctttatggcacaaccaaagacctttagccatcgtctctctcctccactcctattttattttcctccatagcacttattgccacttcaagtttttatatgtttagtagtttatatcctcattgcaatttgagggcagggaccttagctgcttgttcccatggtacacccattggcatacagtgcatgctcaataagcatttttactttagtaatggtgggagaaggcttgttctaccaggtagcaatacacataatggagctataataattaaaacagtgtggcaccagcacaaaaccacagaaatataaagaatgcaggaggagtggtgtgaagactgagagtttgtctcattcatcatgtgcactgaatgcctggaggcagcacctggcacatggtaggtgcccactaaacattaatgttcctatgcacatgaggagacagctgttttaccagacaataaaacacagaacatggccggatgatggctcatgcttgtaatcccagcattctgggaggccgaggcaggtggatcacttgaggccaggagttcaagaccagcctggccaacgtggtgaaaccccatctctctactaaaagtacaaaaataagccgggtgtggtggcacacacctataatcccagcaactcaagaggctgaggcacgagaatcgcttgaacctggaaggcagaggttgcagtgagcggagatcttgccactcactccagcctgggcagcatagtgagactctatctcaaacaaacaaaaacccagaggtagataatgaaggcgggaggtgtagccttcggatagccatgctctctgcctggcccagaggtgtgtgccccacgtctagagcagcgcctggcacaaagcaggctctcaggaatgaatgaatgaacaaatgaaccaatgaatcctgcaggagtcagttgggaggcgaagagcctggaggccgccggacggcgggacccacggcctgcgccagccccctgcacaccccccaccccgggggacccacctgtactcgtagtcggagcccgccttggcagagccgtcctcagtgcggtagtccacgtagaaggtgctgttgccctcgccgccctggcacgtgacggacagcagcacggagccgcagttctccaggcagtggtagaggctaggctcgaagaagatgcggctggcgccgtcgtcttcgtcctcgcccgcgccctcggccggcgccgccctgcgcgaggcgtccgccgcgtgtctgcgcagcacgttcccggcgccggtcatcagccgcgtggcctggatgcggtagaaggcgcggctcttctgctggtgcagcagcgcgtagtagttggcgatgcccaccagctgctccagatccttgtccgggtgcttctgcttgaggtccttgaggatctggatgacctcgcggcggctggcgtccagctcgcgcgcctcggcggggcccgggcccaggccgcccagctcacctggggcctcggcgcccacgaacgtgccgtccagctcgatgctcttcggggggtcgccctcggcgcctatgatgatgccgctgcgtgggtcggtgcggtagcgcttgtacacgtacttgtagaagagcagccgcttgtcggccatccaggcgaataccacgcacaccgggaagaagaccagggtcagcagcgcctcccacacctgcgggcggcgggcgtcagggcgaggccgggcgggccgccttctccctccccgcctctctgtctcagtctctgtccgcctctgccactcctcatctctctccccaacccccaaccccgccccgtcgtctctccctatccctttctgtttcttttctttctttctttctttcctttctttctttttcttttcttttcttttctcttccttcctttcttccttctttctctctctctttctttctttctttttttttttatttgagacagagtctttctctgtagcccaggctggagtgcagtggtgcagcctcggctcactaaaccttgaaccttggcctcccgggtcccggttcaagcagttttcctgcctcagcctcccgagtagctgggattacaggcatgcgccaccatggccagctaagttttgtattttttttagtagagacgggggttcaccatgttggccagcctggtcttgaaatcctgaccttgtgatcctcccacctcgagctcccaaagtgctgggattacaggcgtgagccctgtctctttgttcatctctgcctctccccatctctctctcctccccactccccgtctctccccacctctttctgactgttcatctctgcctccccccatgtctctctcccctctcccccaagttctgttccccccatttctctctctccctcttctttccccatctctctccatctcaatctctgttcatctctgcctctccctgtctctctttcctcccctctccccgtctctccccacctctttctgtctctcttcatgtctgcctttccccatctctctcccccgagttctccgtttccccccatttctctctttccctctccatcttgttctgtctctgttcatctctgcctctcccccacttctctcctcctcatttctctctcctttccgtccctctcttagtttctctcaacctccctcttgtctctgttcatctctgcctctccccatctctctccccccatttctctctctccttccccccatctctttctatctctgtccctccctttttgtctctgtttggctcttgcctctccccatgtctggacgtgtctccatgtcctgttatatcctggtagatctccatctccctcccttgtgagtttctttctttttctctctcaatacctgtgtttctccagagctaattttttcccctctcccgtcaccgtttctctctctcctttcccttgtccttctcttagtttctatttccctcttgtctctgttcacctctctctccccatctctctctctcctttctcccacccctttccatcttgttctgtctgttcgccccctctgtctctgtctctgctcatctctgcctctccctatctctccccacccccttttctctctctctccttgctcccgttcctctccatctctgtctctctgttcctcacttattctctatttccctctcatctctgttcacctctgcctctccccatctctctccctccccttcctcccatctctttttaactctgtcctccctttttgtctgtggcctctccccatctcccccacatttctctctctccatctcgttctctctctctctgtccctgttcgtctctgcctctctccatcgctctctgcgtgtgctgctgtctctttccctccttgcctctgtctcagcggttttcttagcctttcctcctcctctgtctctctccctggctccctctcttttcttgttgcctcggtctccttggctccatctccttcttttgtatctattggtagatatctatttccctcccttgtgagtttctttctctttctcagtatctgtgtttctccagagctacttttctctctctccctccctctctctcttgctccccatctctgtgtgtgtgcacgtgcgtgcgcgtgtgtgcgcatgtgtgagcgtatgtgcatgtgtatatgtgtatgtgcgtgtgtgtgtcctgtgtgtgcgtgcttgtgtgtgcatgtgtgtatgtgtatgtgcgtgtgtccatctgtgtgtgtgtccttctgtgtgtgtgcatgtgtgtgtgtgcatgggtgtgtccttctgtgtgtgcgcgcatgtgtgtacgtctgtgtgtgtatgtgtacgtgtgtgtccatctgtgtgcatgtgtgtgcatgtgtgtccatctgtgtgtgtgtgtgcgcacatgtgtgtatgtgttctctttctctcctagtctcttcatccatctatccaccttttagatgctgagaaccatgcccagctgcccaggtgccaggaacccggacatcctcatccactaccaagcaacagacaatccccaccctgtggtcccagctgctgtcaagggacagagcctgtgtgtcttctggcctctctctccctccatcttttttctgcctgctccatttctcccccatcacctgggggtgcctccacttctccaaacctcgcccatcatccagggcctgctctctgttcacccaaacgccctcagtgccccacccatgacccctaccagtgcctccttagcatttgcctggccctcatggacaggctgtgtctctaacagagacacacatctggctcttctgcctcataaaaccagttcccatgcacagccagggcagctctgagttgggagcctggctttaccacagggatggctgtctcatctcttggtctatacaatggggacatttccaagactgaatgagcacctgcattcctagtgcacagcattctcagtttctgacacatggaaaagactcaagatgtgaaattaacattgcctggccaagcgtggtggctcacgcctgtaatcccagcactttgggaggccaaagtgggtggatcacctgaggccaggagttcgagaccagcctggccaacatggtgaaaccccatctctaccaaaaatacaaaattagccaggcatggtggtgtgcatctgtagtcccagttactcgggaggctgaggcaggagaattgcttgagcccaggagggggaggttgcagtgagccgagatcacgccactgcactccagcctgggtgacagaatgagactccatcttaaaaaaaaaaaagaaagaaaaagaaaaaaaagaacatcgccatcgttattatttagtactattatcttgggcttgcagaggcctaagactcagtctgctggtggcccagcacaggcctggcacatggaaagcatccaccaagactcgagggtttgccttgaagatattcatggaaagactcaaatgttacctttctcatcaaagatgaagaagaaaagataaaagagtatttatgggccaggcgtggtggctcatgcctgtaatcccagcactttgggaggcggaagtgggtggatcacgagggccaacatggtgaaaccccgtctctactaaaaatacaaaaattagctgggcgtggtggcaggcgcctgtaatcccagctacttgggaagctgaggcaggagaatcgcttgaacccgggaggcggaggttgcagtgagctgagatcaccccactgcactccagcctggcgaccgagcgagactctgtttcaaaaaaaaaagagtatttacgatgacaaggcccccgaaggccaggcacagtggctcacgcctataatccctgcactttgggaggccaaagtgggtggatcacttgagctcaggagttcaaggccagcctggccaacatggtgaaaccccatctctactaaaaatacaaaaatcagccaggtgtggtggcgtgcgcctgtaattccagctattaggaaggctgaggcaggagaatcacttgaatctaggaggcggaggttgcagtgagctgagattacaccactgaactccagcctgggggacagagtgagactccatctcgaaaaaaagaaggcccccagagtatcttaaaaatgagcctggtaggaaaaatatctaagatccagttgccacacctgctatcactgtgtttactgctggctcagagaacagtcaagacttgcaaatagtaaaactgcatgaagccaacaggcagatttgggaaaaggagccgaatgttcagcgcaagctgtgaaatgaactctctcccttgtattaattgaacctaccattatgtatattgcaaggaagtctctattcatcagaagacaatcccaaacccctaagattttccttcctccctgcaggtcaataaaaagtgattctagccgattcacaatgtctttctagagcacccactaagaatgtgtccagcctgggagggcactgtgacattttcaggtctcagtggagcaggcacacccctgagacagagtattggaaatctgggggtatttatgggctgccatcatcactagggagggggacatggtcttggcctttcctggcctgatgacatccagcaactcatgggacagtcccacacaatacagaaatgtcccacatgccggctcatttcagaacctgccactaacattcttatccgcacgggacagtcccacacaatgcagaaatgtcccatatgccgtctcatttcagaacctgccactaatgttcttatccgtgaaaacactgtttatgatagttagaatttataactctgttttatgtatttctttctttttctttttctttctttctttctttctctttttgagacagagtttcgctcttgttgcccaggctggagtgcagtggtgcaatctcggcttaccgcaacctccgcctcccgggttcaagcgattctcctgcctcacgctcccgagtacctgggattacaggcatgcaccaccacgcccggctaattttgtatttttagtagagttagggtttccccatgttggtcaggctggtcttgaactcctgacctcgggtgatctgcccacctcagcctcccaaagtgctgggattacaggcatgagcctttgcgcccggcctatgtatatcttttttaaatttctttttttttttttttttctgagatggagtctcactctgtcacccaggctggagtgcagcggctcaatctcagctcactgcaaacttcacctcccaggttcaagcgattctcctgcctcagcctcccaagtagctgggattacaggcgcctgccaccatgcccagctattttttgtatttttagtagagacagagtttcaccatgtcggtcaggctggtttcgaactcatgacctcaggtgatccatccacttcgacctcccaaagtgctaggattacaggcgtgagccactgtgcccggccttatgtatatcttatatgaagtattttcctgtatggtttaacatactgcaaatacacttgttttaaatctcgtggctacctgctcctctgcctagacttcttgcatgcaatggtttctgatctttttctttctctgaagcccagcttattcattataaatagatgcctgcatctggctcccttgtcatgagggtagttgtgatgaagcatttccaggtggaaatgcagactgttctgttagaaaccttttcttttttttttttgagacggagtctcgctctgtcgcctaggcctgagtgcagcggcgcgatcttggcgcactgcaagctccgcctcccgggttcacgctattctcctgcctcagcctcccgagtagctgggactacaggcgcccgccaccacgcccggctaatttttttgtatttttagcagagacggggtttcaccgtgttagccaggatggtccctatctcctgaccttgtgatccgcccgcctcagcctcccaaagtgctgggattacaggcgtgagccacagcacccggcccagaaaccttttctttaggcagggcacagtggctcacgcctgtaatcccagcactttgggaggctgaggcgggcagatcacttgaggttgggagttcgagaccagcctggccaacatgacaaaaccccgtctctactaaaaatacaaaaattagctgacgtggtggaacacacctgtaatctcagctactcaggaggctgaggcaggagaatcgctgcctcagagcgacagagaaagactctgtctcaaaaaaaaaaaaaaagaaagaaatagaaatcttttctttataacacagtttggacattatactgactttttgggaagccaaatgcataggggagtttgttaatgaatagctaacatttactctgtttcaggcagactattttaagtctttccacacggaacaattcagttaatcctcatggtagccctatgaagtcagcactctcatgatccccattttacagttgaggaaactgaggcctggagaagataaggaacctgccctaggtcacacagtgagggaatggcagaggtgggatttgaacccaaatctctggcttcaggtgcatggatcaaactctgaggccacaagatctctctttgattacctaagaatttcatatcagcagaaataaaggggatgtaacaaaatatctgttatattctcctttcttccttttctttctttttttagatagagtctcactctgtcacccaggctggagtgcagtggggccacctcggctcactgcaacctccacctcccaggttcaagcaattcccttgcttcagcctcccgagtagctgggattacaggcgggtaccaccatgccaggctagtttttatatttttagtagagatggggtttcaccatgttggccaggctggtctcgaactcctgacctcaagtgatcttcctgcctcgacctcccaaagtgctaggattacaggcatgaaccaccacacctagcttcaaaggcctttctgaaagcctaagtcaggacaccattcattttaacagcaccttaaactgtacgatatatcactgcacacttttcaccatggcagatgggaaactctctcctctttctctctccctctttcaggagccctgtcttctggtgccactgtcctcccctttcctcactgtggcttctgatccctctgttatatatcctccttcacagaaaacccacaaggcatttttctatctctagcttcagatccttcctgggaagaaactgtaactggcagaaacctgacagataggcaaaaatagattacacacatgtgtgaatgaatcctggacacctgcaaataaattatgcatgtgtgtgactgaattaggccaggcccataaataaattatgcaaatgtaggaggcagtcacggggttgtgggaaatacattaggcaaacgttgtcaaggaagactacatagtatgcgagttaagacatggggtgagcgaaaggctaatgattatgagaatataggtataaattatgcagctgtgggtctaaattttgtctcactattggaataaattatgcaaagtggtcacagggcttatattgatgttgggttggatgggagtatacattacactgaagtggcataaattatcccaacatcagaaattgatgatgaataatgaatgaattatgcaaaccgtgattacatatctggcaaatggctaaattatgcagatgtaggtatatatctatgcgagcccatggataaattatgcaaattgcactaagttactcaagccaattagcaatgtcagaaaacactaggctggattatatgcaagggtagtatgaattatgcgaatggaggatgtcttattgcaaaagcgggaatcagttatgcaaaaggtagggagtgtaggaaaacatgtgaacatacgtagcatgcattacacagatcacaggggctccgttagtacatacaacacccttttgggagctaaaaggtgccccttccaagtgagtgtactgttcttaagtgcaaaacagtgcgtccctctggacaaataaatgtttgctgcaccctccagagatatggctgggtagcatcagcaggactccagcccctccagcaggacttgccctgtttggctcaattcccttgtgtagtctggtgacctgcacaaccgtacttggcagccctctcagatgtgagtgtgcatttctgcaaatacagcaatcaacactccaagccaagagcacctctctggattttgcagacacacatgcaccaagaaagcatctatgcgtctttgctcacctggaccacaccgggggaaaaaacagcaaggatgagataaagccagacataggcgaagatgctccaagaggcagtgacaaagaagactctcaggtgcttgatcttgcggctctcgccggctgggatgacgtagatgcacacggcgatgaccacaaacatgttgaaggcagcgctgcccacgatggtgcctgggcccagctcacccgcctggaagttgtggccgcagacttcgatgactgacagcaggatctcaggtgcggaggagcccagggccatgagcgtgaggttggacaccgtctcattccagatgcgaacggtgcccacgctggtctcaccgttggccttggtgatggtgatctccttctcttttgacgtgatgacctcgatggccgccatgaaacggtcggcgatgatggacactcccagaaacatgtagaccatggccacaaagtacaccactgcccgtgccgccttgtcacccagcgacgggtcgtcgggctcccacacgggcagcagcacccccggctggcagcggtaggacccctggcagccccctgtgctggtgtcgctgtcattggccgggggaggcggcagggagggggttggggtggctgccccggagcatgggggagccgccaggaggagtgtgacccccaccaaggccaggggagccatggggggtggtggggtcctatgggggaggaggaggaggtctgggtgagggaagcaaacctctttctgtcatacaaaggtcaaagctcactggggaaggagggttgggggagaagctgaggaccaatgcaggcaggatggggactgagggcgacagagacacagagagtgacagacagagacccacagagagagagagagactgaaagataaggacagaggaacccccatgcactgctggtgggaatgcaaattggtctatgcactttgggcaactacagccgaacaccacgtatcatgcaattcagcagttttgttcctcggtatgtgcctgagaaataggtccttatgtccactaaaaggacctacaagaatgttcatagcaggccgggtgcggtggctacgcctgtaatccctgaactttgggaggctgaggtgggtggatcaggagtttgagaccagcctggccaacatggtgaaaccccgtctctactaaaaatacaaaaattagctgggcagggtggcgggagcctgtaaccccagctactcgggaggctgaggcaggagaatcacttgaacctgggaggcggaggttgcagtgagctgagatggcgctactgtactccagcctgggtgacagagtgagacttcatctcaaataaaataagaatgttcatagcagctttatttataatagcgccaatcttcaaacaacccagaggcctatcagcagtaaaatggagaaatacgtttggaggatttgcacagtggaatattatagagcactgaaaagggagtgaactatttgctgctgcacccagcacatggatgaatctcacagatgtcacaatggctgaatgaagccaagcacaaaagcactcaaactgcaaaattcactgagaggcagggagcaggaggctctgagtttgttaggagattcaaatggtctccaactcggccctttgaaagctcttgctcaggatttgggctgtggcgggtgttgggccgtgtttgtctgtttcaagtggggctggggaggggttgctggagggtctcattcatgtccctccccaaggtggtagcaggcatcagtctctccagcttccctgtgtctgacctgaggttttccccaggctctataagtggtgcagttccttaggggctgtgacatctaagaccctgtgctgggctttctgtcccatttgtgggtgtgggggttctactgtttcattatttctctccctacctctggtgctgagtttgagtggctattaccgtgtcttatctgggtttccttttaaaacacaaatcgctggacacggtggctcacgcctgtaatcccagcactttgaggctgaggcgggtggatcacttgaggtcaggagtttgagaccagcctggccaacatggtgaaaccctgtctcttctaaaaatacaaaaaaaaaaaaaaaaaaaaaaaagccaggtgtggtggcgtgtgcctataatctcagcacttgggaggctgaagcatgagaatcgcttgagccagggaggcagaggttgcagtgagccgagatcatgtcattgcactccagtctgggcgacaaaaccagactctgcctcaaaaacaaaacaaaaccaaaaacaaagcccacaaatcagcttgcctcatccccctactgttcagaacccccgccagctcccatctcactcacagcaccagcgtcctctccagggcccgtgaggtcctgcccaacctggccccgactccctctctggcctcttttcccaccctctcccccttgcccagtctgcctcagccaccctctcctcccctctgctcctcagcctcaccagacaagcttctgccttggagccctggcacctgctgttcccccttcctcgaacacgcttctctatttatgtatttttgagacgggatctcactctgccacccaggctgaagtgcagtggtgccatcacatctcactgcagcctcgacctccagggctcaagcgaccctccctcctcagcctcccaagtagcgggaagtacaggcgtgcgccaccatgcccagctaatttattgtagagccgggagtctctatgttgcccaggctgtttttgaactcctgggttcaggtgctccacctgccttggcctcccaaagtgctgggatcacaggtgcgtgccaccgtgccccgcccactcttcccctcatatccgctagccttgctctctctgccctttcaggtttccactctgatgtcagcttccccaaacaccccatccaaaatgacaccctccccctctggggagcacccctccattccacaggtgagaggaccaaggcgcagagaggttacggaacttgcccacatcatccagcaccaactctggctcccaggtcgcctctccaagagtggccctgactctgagctcctccgccccaccctcatgttgccatggtaacccagtggcttatcaaaaagagaaggagagaggaagagaggtgtcctgggaacctccaccctcccagacccctctgccaccagcctcatttcttccaggggcttccatttgcttgaaaagttcttctgagagtctaacccacagcctgtccccaactcacacctacatacccatgggctgggagctggctcctctgggggagggaggcagcgtgttggcagaacttcccaagaaggagagagcaagcgaggagcatgcctgtgtgcgtgtgtgtgtgtgtgtgtgtgtgtgtgtgtgtgtgcaggcaagggtgggggagaggggtgattcttaaagggccaccgcacaattagccccctcagcaaggcccctaatgatacgtctaattagcagccccctaattagcaacaacttaggcataattacaaacccaccaggatccaaagcaaaggctcatgctcccttctccctccgcctccctggctttcaggagaaacaggggccagccgggagtcaggaattcttctaaagcatcaaaccaaaccccgctctctctgggaggaagcctcggcctgggaagtcctccctcaggtttaaccacctgtccttcctgctgcagtcctcaagagagaccacagccaggtgatgcgggttctcatgtccaccctcctagcccaggggctgggtcaagcacagcctagtgcaatccctttttcctgcaaaacctggtttctcgctggggccttgcgagaggagcagtcagggagagaaagcactagataaatatttgtgaaatgaatgaccaagaggtctgagccctgtcaccagggaccgtgggctccctctgctcctggctcctgcctctccctctccatccaccagcagccctgaaacccaatctgcttttagaatccaggggcaaaaggatcaggtggagcccagggtgggagcggggagggcagatggcaggtaccgtctcccagggccatctctccctcccttcgtgggcgtgcggccagctgggtcggcagtgagcacccctgttctgcctcacgtgcctcttaggtccttgatcagaagaacaggactgcatgcctgggggtgggtgcagtctggcgtgccaggtaagacccgtccttcatatccctcacgctaccaccccacagtggggcggcaagggagggtgcttttctgactgtgcctgtgttggggggctggcccttgcaggaccgagctggggactcagacttctaaacatgcacatttactgccccagcatgagcgcaggcgctcccatcacctcaaaatggtccagtgtggggatcacaccacagagcttgggtgctcgaggctgtgatacactgataatacgtaaactgaggcccagaggaggaacagggctcttaacctagtgctctttaaagccatctgaagccccctccgtgggcactgtcacacagggctgggacctcacctgcagccagggagacatcatacacacacacacacacacacacacacacacacacacacaccagggctacaggcacagcctcgtaccttttcgccatcactcactctcttgcccaccttctccagggcccccttctctcaaggaaggcagacagtgtgttggccagggccctctcagcaccccccactgagacagtgtgaggctggcacaccaggaaagggatggaagtgagactgcaggaaggactggcccggtctaactcagtacctagtgcttgcccagagcaggaaaggcgctcagtaattatcaacaagaatgaatgaatcaagagctggacaaacagcaagaggtatggaagtgagacggcaggaaggactggtccagttacacgaggaagactggggaggttagattgaagggaggtctggtctcatctctactacagaggctaccggttaaactgcaagaaggaccggcctcagaacgccagaaacaaggcagggggaggtgggctcggtcctcaggggagagctggggtgggtgccggctgggaggagtggagagagcaggggagctctgctgaagtggggagaggagtttagaggactccaggcctgggggagcccactctgcgggtgggggggtctaattcctccaggtcccccctgccaggggcggagacaaaggtgtgtgggaggagggtgcactggctcccagggagagccagagaagaggaaagagagagagaaacagagactgagatatccagagacagagatggagacgagggggagatggggagggagggagagagagagagagagagagagacatgcggacatgggaagagacagagacacagagaaagcagagacagagagagacacaggaaagctgagacaagggagagaggcagagacacagagacacagagaaacagagatggcgcaagaggaaaggagagagaaacccaggacttagagacagagccccagagagactccgaacagaccccggcacagagacacagagagagggagacaggagtgagagactgagagacagggactcccagaggcggccagactctgctagacagagacccctgagacatgtggagagacagaaagatgagacccagacacaggaaggcgggggcagaggtagagagcgcgagggggggtgccccagacggggtgggggcggggtgtcctcgccccccagtacccaggcggtccccctccccagccgcccgagaaccaggagggactgaaggtgttggggcggctggtggcactcccaccccacagaaggtacgcgtgctgggccaggcagccccccacctccataaaccagcccagggaagccagctccaggcttcccgaaccgcccccactccgcacctggggtaaccccgtccttttcccacgcccccacctccccaccaatggggtctcttacctgcggctacagcctggagcaggtccccccagcgctgggctggcagtggtgggcgactccgcccgaaagagagagagagattgagagagagaaaagcctgagactgagagggagagccggggaggaggggagggagaggggatagagggaggagaagaggagaggggagggacacgggggagggggaggcggcgagggagcgagggagggggaggagccggagagagggggaggaggcggaggcgggcagagggaaggcggtgcgggaggcggggggaggcccggggaggggcctgggggagcagggagcccgagcctcctccccagcctccgggttcagcaccagaggcaggggacagcaccggagggcgctcctgtgtgtttcagaagcagcccccgccccccaacacacacacacacacacgcacacacacacacgcacgcagtctcccagccatacaagggccaacagctacaaatagttacagacttacagaactagggggagggcaagaatgtttagctggagtcagatccaaattcacatactgtgcctgcacagcctcacaaaggaggccagaaacaaccacaaagacacccattaataagaataacaacagctgccatacatacaggcagccctgaccacgtgcctggcatcggcagcacattattattatttgagacagggtctcactctgtcacccaggctggagtgcagtggcacgatcttggcttactgcagcctcaacctcctgggctcaagcaatcctcctgcctcagcctcctgagtagctgggactacaggtgcccgccaccaccacgccaggctttttccctccattttttttttttaggagatgggatctcaccatgttacccaggctggtctccaactcctgggctcaagcgatccttctgccttggcctcccgagtagctgggactacaggtgcccaccaccaccacgccaggctttttttctcttcattttttttaagagacggggtctcactattttacctaggctagtctccaactcccgggcttaagcaatccttctgcctcggcctcccaaagcgctgagattacaggtgagagccaccgcacaggtgagagccaccgcacctggcatgttctaatgttttttataaatttaggtaaatgctattatgagcttcacttacagacagggaaaccaaggcatgaggtggtaaatatggctccagattctacacccttaactgctgcaccgcacaattccccaggctgaggacgggtcaggtcaagaagagacttgcaggctgggtgcggtggctcacgcctgtaatcccagcactttaggaggctgaggcgagcagatcacttgacgtcaggagttggagaccagcctggccaacatggcgaaaccctgtctcttctaaaaatacaaaaattagccaggccaggtggcacacgcctgtaatcccagctacttgggaggctgaggcaggagaaatcgcttgaacctgggaggtggaggctgcagtgagctgagatcatgccaccgcactctagcctgggtgacagagtgagactccatctccaaaaaaaaaaaaaaaaaagaaagaaatgaactgcaaagggccaggcaggtggcctgggctcctgaagacacaaactcatgcaccctgcgatgggcccacacacatacccccacgcaagcacacacctctgcaaggcacaccagcactacacccacccccaatcctgctcccccccacaacagggggtgatggcgtgttagtcggtgtggagtgctccttctctagaggcggacagtgggagggagggggccttgctcgtgccaccggtcctgcccactgccagtcctggctggacaccgtcaggcctgctggccaggggagggagaggatccggcttcctccaacttcccacgcctgggcctggcttctgggaaagagggtgaagacaggggtggccaggagttgctgagctcctaactcccataaacgctcggtagagaactggtggctgggtcttccctgtcagtgctggtggtcagacttctgagtggacctccatagcgggaggtagacagatggccaaaatgactacggtgtctgcctctcccctgaacccccaggaagcagatgtcctgcccaacccctgcccccagcctggatacggcccagggaatgatcatcccccaaccctgctgacccagattctattcctggcctgcagtggacggaggacaagacttccatcgttcccaccctccactgatcctagagacacaggcctctgattccttctcctggtaatacagaacggagcacaggaggccgggctcagtgactcacgcctgtcatcccagcactttgggaggccgaggcgggcagatcacctgaggtcaggagtttgagaccagcctggccaacacggtgaaaccctgtctctactaaaaatacaaaaaaattagccaggcgtggtggcgtacgcttgtaatcccagctactcaggaggccgaggcaggagaatcgcttgaaccaggaggtggaggttgcagtgagccgagatcgcgccactgcactccaaccagtgcatcagaatgagactccgtctctcacacacacacaaaagaccacaggcaaggcaactcctaccaccacaggctgggagaatcaggcttgtctcccactccctgggcccccaaccccctaggctttttagattaggtctaagcttagccctttccagcatggtctagcctgggtcttctccctgggtcttgcctcagtgctctccactgggaactaagctcactttctgctggggtttaaccctggccccttgcacaggatctggccatagcaattttttgttggggtccaacctcagcattattcatagggagtctagcctcagaccctctgctacaaatggaccactgctttcccacagcagccctttctacccacaagttttcctctaaacgctcaagctccttacctttccactgggatctacccttagatctagatctttccactggggtctcatgtcagctctctccactagggtctaacctcagctctttcccttccattttacgtaatctgttccacagtggtttaacttttagcctttctgctaaggtgtcaccccatttctttctcttgggttctaccctgggatctaacctccggcctgtatctgggtctagccttggattccctctcccccaaatccctctccctcaattcctctgggtgaatccagcatccaacacagagccaggcatacagcaggtgctcaccaaatgcttgccgaaaaaaagaatcgagacaactgggaaatgatgttcttctggacgtataaataaccatcaggtggccaattctcatccagagtggacagggtggaatgggatcatccctgctttcaaatagggacattgacgtacagagagaggagtgggttagctggggccccagggcacagcttcaccaccctggggaggtctggggagagcatcctgtccttcaggacaccccccaccagcggctggaggtgagcacgccatgagtcgccccaggtctgggaagagtgggtgcatgggtgcttaagaggctgcattctcagcaggccctgcacctgccccgtcctccaacccctgtagccgacgtctcctctgctccacttgatgtcgaagccgggtcaagaccagctctgaggcctgaatcaggctgtgctgtggggaacaagagaatgagggggatggagctgaggaagagctgtgggaccacagcgggaccgtctggagtgaagcaactccaaaggccaggagctcggcccacgtgggagggcagagagcagaccacagtgtgtgggatgggaatgggcctctgtgacaggggtgaaggggagtggccttaagcgaatttctagtgggagggacaaagcctagacccaaatgtaaggaagtgagattagaaggaatataaaaggaatataaaatttagccaagcttggtggcaggtgcctgtcatcccagctactagggaggctgaggcaggacaatcacttgaacctggaaggtggaggttgcagtgaactgagatcacaccactgcacaccagcctgggaaactgcactccagcctgggaaacagagcaagactctgtctcgaaaacaaacaaacaaacaaaaaaaccaaaaaaaaaaaaaaaaaggccagggtgtggtggctcacacctgtaatcctagcactttgggaggccgaggtgggcggatgacttgaggccagaagtttgagactaacctgggcaacatggtgaaactccgtctctactaaaaatacaaaaattagctgggcgtggtggcgtgcggctgtatttcccagctgcttgagaggctgaggcatgagaattgtttgaacctgggaggtggaggttgcagtgagctgagatcgagtcactgcgctagagcctgggtgacagagcaagactctgtctcaaaaataaaataataaataaataaataaatctccttcaccaggccggtgcccccaccccagctgctgtgagcgctcacagctgcccctttctcctgggagttgtcctgactggtaggaactgcctccctgaaatgagttcctccctcccccaggaggaggcctgcaccccctgctcgaaactgctgaggtcgactcccctcccaccccaagagctggggatacctgcaggatgtgcacgcccttcagggagaccacggcaagctcctgcagcccatccccggtcaggtccacgtgagccatggccagcaggggactggagaagctccgctgccacagcagatggaacccgtgctgggcctcaggaagccccgactctgggccccggtacttataacacagcagttcctgcgggggtgaagaatcaggtcacacaggttgatggggggacagtggagggaggccggtgggtgtggctccaactgtcaggtcccacctgtccataggtggccaccaggacttctggccgcccatccaaatccacatcggtgaccaggctgcagaggacgctgtcaaactggtcactgccgggcaggagaagctggtcttcaagaccccggttcagcaggtccctgagggtcccaaatacagcatatagactggggtcagcttgcagtgcccagcacccttggcggatgctaagctgggtaccggtactgcttcccttctcaggcctagacacactggtcctccggaagcctagacatcatcatctcagatttggacatattcatagacccagcaaggggtcaacctgtgcactcaagcccttcatctcggagaccatctcactcccaaatggaaagccacagtgtcccatctgaggattcagatgcatgtgtcctcaatttagacacccacgctgccttcgtggagcccgaagagggcttggccctggcctggacaccttcaccacccctagaggggtgccagagctggctatagttgcttccgagagctgactgggaaatgttcccatgtaatcatgttcatggtttgaaagccaccatggtgggagtatttacactttggaaactctggtaaatgctacaaacctgggctttcctcgtgcatagccagtgattaaccattttccagcatacctactacatctactccagggggcacaggcatctctgctcccaccccccagcctcaacatattccctacaagtctagacttcaatattcacagcccccacccctgggtcacgagtatctgtacttgtccagctctgggtaatccacccagaggaacttactgtagagaatgacaaggttagaccacagtgcaaagaaagaaggttagaccacacccatgtgtctcaggccccctcaccgatacaccactgctggctccaacatgctggccacgagcacgctgtactcatcttgtagtggcctgtccttggtctctggagaagaaacatgaatggtaatcccagcactttgggaggccaaggcgggtggatcagctgaggtcaggagttcgagaccagcctggtcaacatgataaaaccccgcctctactaaaaacacaaaaattagccgggcatggtggcgggcacctgtaatgccagctactcaggaggctgaggcaggagacttgcttgaacctgggaggcggaggttggagtgagccaagatcacaccactgcactccagcctgggtgacagagcgagactccgtctcagaaaaagaaaaaaaaaaaaagaaacatgaatgaataggggaaaggttttgtggggacaggttccaggctcctcgtcataccccaggcccctttaatgagagacatgcaggttagatctcaggaaaaagtcttgaggctgtgctacacagggagggttagagattggcccatgagacaaattataagtcagacaccagaaggagaaataggtgttagatgatggcttaaaaagtctgaggttctgggtgtggtggctcatgtaatcccagcacttttggaggccgaggcaggcggatcacctgaggtcaagagttcgagactagcctggccaacatggtgaaaccctgtgtctactaaaaacacaaaaattagcctggcatgatggcatacacttgtaatcccagctactcaggaggctgaggcaggagaattgcttgaacctgggaggtggaggtgatagtgagccgagattgtgccactgcaaccagcctgaccaagactctgtctaaaaaaaaaaaaaaaaaaaaagacatttgtgcatgtatgtttacaacagcccaattcacaactgcaaagatgtggaactaacctaagtggccattgactaatgagtggagaaagaaaatgtggtatatatacaccatggagtactactcaagtcataaaaatgttgtcttttgcagcaacttagatggaactggagaccattattctaagtgcagtaacataggagtggaaaaccaaaaaatgtatgttctcacagaagagggggccaacctatgagtatgcaaaggcatacagagtgtataatggtgtttggagattcagaagcaggaaggtgggaggcggtgtgggatagaagctacacattaggtacaacggacactagctgggtgatgggtgtgctaagatctcagaatccatcactatagaattcatccatgcaaccaaaaccacttgtgtccccgaagtgattgaaataattttttttttcttttttgagatggagcctggctccgccacccaggctggagtgcagtggtgagatctcagctcactgccacttccacatcctgggttcaatcgattctcctgcctcagccttccgagtagctgggattacaggtgcccgccaccacgctccactaatttttgtatttttagtagagacagggtttcaccgtgttggtcaggctggtcttgaactcccgacctcaggtgatccgtccgcttcggcctcccaaagtgctgggattaccgcgcctagtcaaaacttttttaaaaaagcaaaatgccagtcagggacagaccccagtaaaggagcaggaatgatcaacatattgggggaaaaggctagactctgagtggtgggacagcggtgagtccaggagcatagccgggagctagaatgcaacaagagacacagtgaaggggccacagagcggggtgaggaaataccgatgtgagacgtgcaggttagagtacagagggagaggtggatgctcagccccagggtacggggctaaggttacaccaaagtgaggagaacaactatggaccctaacagaaaagatatgggttaggccccatgtgccagtcctggaagttaaattcacaagaggggaggggagggaagaggtgcactgtagctcaaggcctggagtgggggatccaggagagagggactggggtctgcacactttgggagaggggtgcaaatctgggtagaaggacccaagaatgcagagttgcctcttccctcccacccgctctctccccatcccctcaaacccagagctcacccttggcggccgagaggctgaacacaatcactcgggagatgggaccgtcctgcaggaccgaccacatctgcagaacctctgcgtggagagcgaggattcagagccccaaccccaccccggtcccgcccgcagccctgaaaccatcgactttccgcccccaccgttcatccccaccctagccccgcccctctgaagccctcaaccccaccctagccccgcccccaatccccaccctcatcccttcccccacttcccctacctcacccagcaatagccctcggccccaccctagccccacccggcaagccccaccctcatccctcaacccacttatcctcctcccctaccccacccagctccagccctcagccccaccctggccccgccctctagccctcaaccccaccccttaccccgcctcaccgcggccctcacctcgactccgctggtccacgtgggcgacacggacataaccactctgacagcccagagctgagaggcgccgggacgtgccggggaagttgtggacgtccagccagaggacgctggcgggcgggtggatggacaggacggacggccattgctgggcccagccccgcccctctgcctccccaggggcagccgcccctccctgtagccctgggaccctgctgcttgattcctcctggataatccccaccgcccaattcctctgaggtcaattctcaccacccgagggctgagtccacctcttgttttttctggggtcacccctgctgatcaatttctctgaagtcatgccgtggactgatttttctgagctcctccccggtgaccaatttctctaaggtctcaccgcccgatttctctgatgtcagtgccccggtccccagtggcctctttcggggcctctcctacctactggtcaggttcgtcagctctgggaagaggttttccacgggctgttcctcaaactgatgcagcccctcgttctggggaaaccaagacccaccccacccccgcttaagtcagccgtcagcttcacacatatacccacccagcgccagcccacagtgaatcccacagggctctgcccagcacgccgccccacctcacctccttgtagagatgaatggccgggtcgttcccactcaagagaaacacagtctcaagttgatccccgacctggaccctgaaagcagagaaatctagaacccaaggtagtggaatccacatggtctgagaaccagaactctcctcttgcaaaaacccctgcctgttgagaaccttaacattctgggatccagacactagacccagggttagaatctcagggctcaagctcctgagtactgtatctccttgaaatacataactgtagaaacgagccctcatagaatctcaaaatcaaggaatgtacctcccaatctcagaattgcgggaacatggcttgctagaacctcccgctcttagagcccgcatctactcctaccttcactctgtggattcaggaatcgaatgtggaactctagaatgaactgcagaaccttagaaagctaggacctcttcattctgaaaccctggtattctagaagtgctgttttctgtctccttaaaaatacaagaacttctagaatttgccatcatagatttcagattcacggaatgatagaatatccaaatcctagcaaggagaacattagtgcaattagaatcttcagttttggggactctcacctgttagaccagaggttggccaagttatgacctgcagaccaaatccaacccaccatctgtttttgtaaataaagttttattggaacatagccacatccattcatttatagtgtcaatggctgctttctggctacaatggcaaagtgagtagttgtgacagactggccctcaaagcctaatatttactatctggatctctaccaaaaaaagtttgccaatccctgttctagaccatctgtgttctggaatggaatctggaactctagaatggaacccacacactttggggttctagcaccttggtattctagatgctctatgttctatctcctcgaaagatgagaatgtcaggactttatcattacagaacctcagaagattctggcttctatcgtactgtagaatattcaaatgttggaatcttagagcctacgactctagaaaacttagcatctctgatcttggaatgtcagactctagaacattagaatctgggaattctagatgtgcagaattcccagaattcacaggtgctccatcaactctctcagattatctagttcaggaatggcagtgtggtggccccttggccatccggtccatggccaccttaaaagcatgatgctccggccaggcgtggtggctcacgcctgtaatcccagcactttgggaggccaaggcgggcggatcacctgaggtcaggagttcgagactagcctggccaacatggcaaaaacctatctatactaaaaatacaaaaattagccgggcatggtggtgtgagcctgtaatcctagctactcaggaggctgaggcagtagaatcacttgaaccagggaggtagaggttgcagagatcgagccactgcactccagcctggcaacagagcgagcatctatctcaaaaaaaaaaaaaaagaaagaaaaaaaaagtgcaatgctttaaaaaacaaatgtagaatctgattgtctatggacaagttcgtggtctccagttagctacagctttccaacctcagctgcatatgtgtgtgtgcacatgtgctccctgttatattacatttgtgctttccattctcacatgacctctctggtccccaaaggcattttagtttaatttcattttattttatttatttatttttgagacagagtttcgctcttgtcacccaggttggagtgctgtggtgcaatcttggctcactgcaacctccgcctcccgggttcaagtgattctcctgcctcagcctcctgagtaggctgggattacaggcacacaccaccatgcccagctaatttttgtatttttagtagagacggggtttcgccatgttggccaggctggtctcaaactcctgacctcaggtgatccgtctgcctcagcctctcaaagtgctgggattacaggtgtgagccaccgtgcccggctggcattttagttttcaatccctaatctagtacaacctctttattttccagaaggggaaacagactacaggggtctgtaagtaaagaaggggttcgagaagccagggtttctacatttacagtggagtgggcgtcgatgcgcaggggacactcactccgcatggcacagctggaacggagtgaactggagctccaggttcaggcagctctctgtaggcagggcacaggcaggttagcatgggggacctgctggggactctctccctcctcccgtccacgcctcactcacgggcaatagagtcaaggttgtactcagagccgggctcgtagtcgcagtaaatgttcaggaaggggctgcccttgtcccctgaatcctggcggaggacacggggttcaggggagggcaggggtggcaggagggatccggggcggctcagtggaactcaccatgtgtgtaaggaggagggcgaagggaggtggagggggctctaggtaccttgatgaacgtgatccccacaaccagaccccgcttggggggtgacttgttgaaagtgtcgatggagacaatctccgcatccactgggaggggagagttctaagttcagtgtcaggcagactcatgcttccaatctccccaacatggtgagctctggctaccgcaatgatcatgccctctggtctgagtcctgaccaccatcacctgatctctgttccctgggtactagggatcctgacctgtaagtctgaagaatcctgaaaccctaggctcatccgggccccaactatgcctgcccgctgatcccagtgacccccttaaaaccacctgatcccattcttccagcacggtgacccggctcagacagagcctcagaagccttctcaacaccacgttccaggcccccgccccccagcaccatagcgccacccaccgggaatgtagttgaactgcagctccttggccactggccggattttctgtcggaggtcttggtagcggaagccgagcaccttgcctttaagggtggcggccagcagctccccgcgcccgccggcgccgcctgccagcccgtacacattgctctgcgacgagaagcgcgtgaagctgtcctcgcgcaacggacaaggccccgcggccacggccgcctcccccatcatgcccctcagttaagcaccctctccgcagcccccgccccaacccgcactacccaacctacgactctctaagcgacctgaaccgccgggtgcccggccgttgcgcgggctgatgacgtacggaagctgccggcgttgccctctcccaagatggcggccaggtcgcctgctcgggcctcccaggcgactttgccccactgcgcccgcgctctcttctcctttccatttctggaccaaggggctgccataaggagtctgtgactagagatgggaggtggtggccacggcctctcgctgtatgctgtgtggaaggtcgaatcatcatcatcataaaacttaatattgcccttatgtgccaggaactactgtaagtgcattccatctaatactttattaaaaattcgcaagggggtggaggtaggtacttaaatccattttagagatgaaggaattgaggcacagaggggtaaagtaacttgcctaagatcacacagctagtaacgagcggtcagtactggaaaccaaacaaggtaactccacagttcactattttttttttttttttttttgagacggagtcttgctctgtcaccctggagtgcagtggtgcgatctcggctcactgcaacctctgcctcctgggttcaagcgattctcctgcctcagcctcccagcagctgggattacaggcgccaccacacctggctagtttttctatttttagtagagatggggtttcgccatgttgcccaggctggtctggacctcctgacctcaggtgatccgcccacctcggcctcccaaagtgctaggattataggcgtgagcccccttgcccggcctatagttcataatcttaacagtatcacctttaaaataattaatacattcttcttgcccccaaggaaaaatgatccagctataataaccacctcctttatcgaacacctacttggtgacagtcatgctggctctgataatctgattccttacaactgttctgcaagggcctactgttaccctccctgccggttcacttattcaggattcattgagcttttactatgtgcccggacgtcctttgcaaatctgtctcactaatctttgcaagaaagaaacctctacaaagaggtttattatcccagtttagagagaatcaaatggaggctcagaaagagtaagtccactgactgatatgctagcaagtggtggggacaggatgtaaaccaggtgtttccgactctggggccttcaggggttcctgtctgtgctgctttgtccctagaaggccatggaggtttgggtactatgtgcacatctgtgtatcatttccagaagacatgggttggccagctgtcctggacacctcgagcacacacagactgcaagctccatgaaggcagcaggctgatctcccttgatcacggccttatcgcctgtacctggaacacaaggcctgacacaaagcaggcattcagaaaatatgtgtcaaaaatcacaaactatgtgctgagcatgtaagagacagctcttacatgatggaaagttctcaaaggcagactggataacggaggtggcaaggaatttgtgatgattccagatttctggatgtggagagtagaagttcctggagggcagtctgggaatgccgtcagtgctgctgtattcccagggcctggcatgcagcaggtgcttagtgaatattcgctgagggagtggcacgtgggtctagtgccacttcagcagtgcgtttccttcaggcgtcttcccgccctagtaacctataagccacatgttgagcggatgaatgaaaaaatgaagttacaggttaggaaggaatcatcctgttaagaggtttccaatcctagctgcacacttgaactgcctatgaagttttaacaaaacaaaccaaaacaggccgggcctggtggctcatgcctgtaattccagaactttggaagctgaggcaggcggatcaactgaggtcaggagtttgagaccagcctggccaacatggtgaaacgctgtctctgctaaaaatacaaaaattagctgggcgtggtggcgcacgcttgtaatcccagctactcgggagactgaggcaggagaatcgcttgaacccgggaggcagaggttgcagtgaaccaagatcgcaccactgcactccagcctgggcgatagagcgagactctgtctcaaaaaaaaaacaaacccaaaaacccccaaagggtaggaaacctcagtcaaaccacaatttatcagagtgcggccccagtctggatacttttatttttgcaccatcatgcctaatttttgtatttctagcagagacagggttttgccatgttggctaggctgctctcgaactcttgacctcaagtgatccgcctgcctcggcctcccaaagtgctacgattacaggcatgagccacagcacccagccccaagtctggatacttttaatgactttaaagcatagccagggcggaccatcactgatttaggtcatggatgacagaaacagattctcacactatccttcagccagcacccatgatgggggcagacatggtaatcaatttcaggtctcagaagtctttgctgccattatcagtggactggagctgtgggagaagctgcaggggagagaggagcagggcaggtgtcaaggaatttgaacctcacctgcacttctctaggctttctgggctggagcccctctcccaggagtccaccctggtttcctaggcagcccctcctctgtgcaattactgcccctgctcacttcctgacattttcccatcatgcctgggcactgagcctccttcagctgtctcctctgtagcgaggggccctgcgcggggcagggtaaagcacatgtgtaccagacagggcccccaacatgcacattgtggagtgtggtggaggcagctggtttctgcccacctttcctgggcaaaggctcctgctatctcctcccccactccccagacccactcgggcctcagactctgcccaccaaagccgcttcctcccccgtcctgtgacagatggaacaactgtcaccggggcgttcagccttcctgccagagaaatgtggacatgggagattcggtgggcttccacccattctcatccaaagcagtcatgaggaccgtcacattcgaccctcccactggctctgaggggtggcatcaccaccgtgcatcccagttgaggaaatcaaggcccctggaccccaagaacccagagaaagatcaagatgggcgctctgggactcccaagccagagctcctccccaggcccaccgtccctgggtctcccccacctagaaactgacccagcccacacgtgtttcaaggatgcatgcgcctgacctcccaagagctcgcccagagtctgggggaccaggagtgtgagagggactggtgactggcccaggggcagagtgggtagcagaggtgaggaggaagagagactcatgcaaaagtgttgttttttattttctttcttgggccagctgcagcttccaaccaagaaaacctcaaagcattagggaaggagcaggtgtggggctggggtggggagaatcccctaagctccagggcccagggtctaacctgagaggtcggggctgcaggaagctgggggaggctcccggggctgggggaagaggagcctgcccccagcagaaacagcaggtctcagcggctacatgtgctttagagcttggctgggggacaaaagtgggagagagagagaaaccggcctcatgactcagctggtcaggagatagggggccagatgctgaccccaaatccccggcagcacccctagcaaataggtctgtatcaaagattctgtacagctggttttgggggtgaagggcacctatgggggcttaaataaatggacagggggcaagggatgtagcgagaacagagggtgactgtccggccagcagcctgggcctctggcgcccctgcatgctgacccccggtgccacctgcccactgtggcccgcggcactccccagatgggaaaggagggaagctctccagcaagtctcggccccacctctctctgagcagatgggacaggaagacgggcactggggggctgggtggggcttagcgcaggtcctcctcatcgccctggatggtcttcttgatgcgcagcagcatggtggtgagccactggtccagccgggagatggagtcgtattccttcacctgagggcacaccaggtgataggctggccatgctccccccgttcccaaccctgcagcccaagggcacttgtcccaaggttttcaagatctgtctctgtcacccctggtctctgaggaggagtagagggagggcttgaggccccaactcagccatgggagctccctcttgtctgtcttgactatgctgggcacatcatttcccttgggggagaaagatattgtagctttaaaaaaaaaaaaaggtccatggctgggcgcagtagctcacgcctgtaataccagcactttgggaggctgaggcgggcggatcacgaggtcaggagattgagaccatcctggctaacagtgaaaccccgtctctactaaaaatacaaaaaattagccaggcgtggtggtgggcgcctgtagtcccagctactcgggaggctgaggcaggagaatggcgtgaacccgggaggcggggcttgcagtgagccgagatcacgccactgcactccagcctgggcgacagagcgagactccgtctcaaaaaaaaaaaaaaaagtccagcatcctcactgaatgggtgggaaactgaggcctggagatatggaaaaggccactcctgagtgccatgggacacgggggagagaagccacggcctgctgggcatcccctccctgagctcctggctgagttgccacccactgtctggggcaggaggaacaggatggcattttcactgtcctcagttaggggcttccattcccaaggggcacctagggagaaatgcttgacatgtgccattagaggagtgaatcaggacctgagccggacaccactaagcccgggaatgctgggaacagagaaagggaagggagagagagccgcgtgggcggctccaccaggcagagggaagctggcacctctcccatgtcctcagctccactctccttctcaccccttccctccccgtctgtgcctcctgggtgcccaaggcgcccactgtgagtctcacacactcacctgggggactcaaggaaccctggtcttcagaggcagacagatgtggctctgaacaccagctctgtccctgaggggccaaggccgagcctcctgacctccccaacctcagtgccaccatctataaaatggggagaacactccctgcgcctcttggcgctacttgtaaggtttctggggtgactggagaaagaacttcacagtgggctgggggccagatgaaatgggtgaatgtcatggagagcgtgtctgagaagggcagctttcctaggagacccatccccgtgaaggggcctggccccccatgctggccactcaccgactcggtgtagctgtccacattctgctcctcgtgggcctctagcaatttctgcaagcaaatggcagagaggggtcaggggcctatgctgacctgaggtctggcctggattagatgaaaggacacgctatctgtatgccaggcctggggctggggcttcctgaggactctcagagggtcaatccgtgtgggttaaactggggatgggtacgggcgtgttgcgatcctgctgccctattcatcagaaacggcttgctctcagggcaaccttaccaacatagaacatcacacagaatgtgtgtgtgtgtgggtatggggggtgtgtgtgttgggtgtggtgtgtggtggaggtgtgtgtgtgtgtggtgtgtgtgttggggtgtggtgtgtaggggcacgtgtggtgtttggtgtgtgttgagttgcgtgtgtggtgtgttcggtgtgtgtgtggggtgtgtgtggtgtgtgtagtgtgtgtgcaatgtgtgtgtgtggggtgtgtcatgtgtggtgtgtgtgcagtgtgttttgtgtgtgggggggtgtgtcgtgtggtgtgtgtactgtgcaatgtgttttgtgtgaggggtgtgtcgtgtgtgtgtagtgtgtgtgcgatatgtgtggtgtgtgatgtgtttgctgtgtgtggtgtgtgtgtagtgtgtgtggggtgtgtggggtggtgtgtgtgtagcgtgtggtgtgatgtgtgtggtgtggtgtgatgtgtgtggtgtggtgtgtgtagtgtatgtttggtgtgtgtggtgtggtgtgatgtgtgtggtgtggtgtgtgtagtgtatgtttggtgtgtgtggtgtggtgtggtgtgtgtagtgtgtgtgtgtgtgtccacctagccatcctgagctccagcactccccgagttgtactttcttcatctggaaaatggagactcaaatggccaaacaaaacaaaacaaaacaaaacaaaacaaagacaccctctgagaactactggacaagtcttggcgattgtcccacctggagccccagccacccccgtctgaggttcgggaagggggaggccggagcacccagcacttactttcatcaacttgcattcccgggaatcagagaaagctgggaacagctcctcatacttttggacagccagctgggcagcagggaagggagaagatgagttagtaacaagagggtcctcagagctactggcctagcagctgaggggacttggggatgtcgggtgatattgagtcagctcttgcacccctcccccagcctcaggtgtcacctggctctgtgtctgtcagtaccttcccgtagctgagctcagcaccagcctggctgcagagatggctgcagggagaggtgggtggagggggaaggttccccagataggcacccactgcctcctcccacctggctcagctggggcaggggacaaatgagcacatcctccatgccaggcctggggctggtgcttcttgaggaccctgagagggtcaaatgacggtgagcccccttttcaaagtgaggaaacagatccagagaggggcagtgacctgcccagggcacggtgagacatggggtgggaatgggaacctggtctgacaaagcccaagcttttgcccaccaccggtgcccacagcagggcagggctctgtggggtgtgtgtgtgtggggtgtgtggggccaccaccccaggccgtgagccagggacaccaggaaatcctggactccgtgcttctgccaggcaatggtaaaaaaactccggccaagcaaaatctagcgccaaccctccagctccttcccgctggccacgccccctcccactgccctctttggcccctcttttgccaagtgtcctgaaaataggtgggcatgtgtgagctacagctaaagccacgacagcaggagtcacaaagatctggaacactggggctgcaggtccctagtcatgtggcctcaaacaagggactctcgtcccagcctcaccatcttcacccataagacgcggtgacaatggtgctgactttaatggggtgcagtgaggattcaaaaagtgcacccatgaaggaaagagcactaagtgaggcaggagctggacccgcaaaagcctccagggctgggtgggcaggtgatgccagcacagaaacacagctgtgagaaccacacttctcatccaaaggctggctggcaggggccagacgtgagggaggagcacgtccctcttcgggggcaacgggacctggcctggagataagcacatggtggcctggtgcggtggtcctgcgggcgtggggtgtgctaccttggcgttgagcatgtcgatgcagaagtggcagagggccgccttgaagaagtagtctttggcgctgtacttgaggagggggctgtccatggcattggtccccacctgtagccatggagaagtggcactggtgagctcagggcaagcagccagagggccagagccactgccaggcactggggggccagctgggagctggttcatgtcccgaggtgaggccctgttaacccaggaccccaagggcagggagccagggaccagcttggagaggtcagcggccagtgcgtgagcgaccaagatcagggtgtgatggtggctgggtgggggtggaggctgtagccaggtgttcgtgggccttctgagagcctgagacagtgggaaggaggcagcctggctgtcaggaccaacgggaggctggcatggcggtgggcagagcggcggcaggcggtgggaacatgagaggcggcgcccgcccctctctcccagggggccagctgcctgcctttttctcggccatcacccagggctccgtgcacgctggggggaccccatgtgacactccctccctcccactgtggatgaggaccatcgggccatggggtggggtgcccacggccaccctgggcctcttggcacttcttcccattccctccctctgggttctttagccagcctcactctgggcccctccaggaagctctgcgaggggtgtgggaggggcacagccagggagagagacggtgctggcacggcatggagtcgtaggtggagaacattcagccaggctgaagacagggtggggggatgacatggcaagggatgtcgggggagaggcagagggtgagccgggggaggggtggttccagaacaaggtgccggggcttaggaggaggcacaggccctgagagggggcagggtggaagccgccatccccacctgtccccacctgttcgtagatgtcaatggccttctgatactgctccagcagcgcagcgtaaccagccaccttcagcagacacttgttggctgagctgtgtggggaggagtagtgaggggaagtggtggcggtccctgcggggctggggcaggcaggaagggggctacctgttggactcctcgcctttgtagtagtctgcagactgctcgtagtgggcaatggcctggggagacacgggggatgggttccaggggagggcagggaagggagaggaggcctccgtgaagcttccacaccctccgccctgcctgcctgggacacagccagaccccattctccaagctctgccggcgccccatgcccccttctcggcactcagacaccagaggactcccctggtgggaagaagagagagcagcactggtcctggctgccagcccatgcagggccctgctgccactcaccttctcgatgtccaccaactctgtctcatagatctcagcaatggagatgtggtgcttggccgcaatcgtgaatcggccctggaggggacacaggaaggggctgcctgcgactcatgacctcctgcgtgcctgcctgctgacctatgacccttcaagttcccacccctcagccacgcctgtgaggaggtatgaagaagacctgaggtgtgaagaagatcgagaggtgggggaacacaggagtgagaagggagggccccagcactagaggcctggctatgcgtgctgggctgagcgggtgatgttggacaagccactccagggccttagcctaattccatcccatccacgagggcacagatggtgtgacaccagagagaatgtgagcacgagcacttggccaaggccctggcccttaggaagcctctgataacagccagagaggcggaaggaccagtccagagccacttggcaaagggctctggagaaaccaggatgggagggagggcttgagacctctgcccaagagtaccagctctgcccccaggccaacacctatctgtcagcctcccccaggcacacccagagctccccagggaggcctcaggttccaaggggcctcgcaccttccatccgcctccacccagtgtccaggcgcttgcctaactgctctgcaccaggggctggtccaacgccacccccttgctgagggcagtaggaaagggcaaggccctgggctcagccagaccttgtttcgggtctcagtgactcctgcttgtagccacatgtccctgggcaaatcatgtcacttgtctgagcccctctcctccactaaggaacggggatgacaataatgccaacctcacagggctgtggattaaaccaccctgcagtgtctggcctaataaatggcagctgctattattgttctaatcacagtcatccctgcagcactgccctgaacgcaaggggtagggctcgtgtccctgcctggggttggagggctgagacagacagggcaagcggagaggcaaaaaggagctggccaggcacggtggctcatgcctgcaatcccagcactttgggaggccaaggcaggtggatcacttgaggtcaggagtctgagaccagcctggccaacatggtgaaaccacatctctactgaaaatacaaaaattagccaggcatggtagcacacgcctgtaatcccagctactcgagaggctagggcacgagaatcgcttgaacctgggaggcagaggttgcagtgagtggagatcacgccactgaactccagcctagatgagagagaaactctgtctcaaaaaaaaaaaaaaaaaaaaaaagagagagagagaaagcactgacaggagccccggcctgggtgggacccttcactctggctccagttggcagctgcccatctggtctgcatctgtcgttggcaacgcgccctgggggcagggcaggtgctgagcctcctgtgggctctgcctatccctgtggcctgctgcaagatgcttatcaaatgtgacacttgcgggaaggctgggcaaggggaagtgccggacacacactctccagtaacctaatttctttttttgttttgagacagggtcttgttttgtcgcctacgctggagtgcagtggtgtgatcacagctcactgcagcctcaacttcctggactcaagcgattttcctgcctcaacctcccaagaactaggaccccaggtgcatgccactacaccaggctaatttgttgtagagaggaggtcttgctatgttgcccaggctggtctcgaactcctgtgcccaaaagatcctcccacctcagcctcccaacatgccaggattacaggcatgagccaccctgcccagctcaataacctaagttctatgaatgaaaaccatgactgcctgtggagtgagggggccgtcaggctggtggggagctgggtgaagacccagccagcccaggccagctcaggtgacctaatccccccagctcccacttccccctccccaagtggtttggccgcagaataagaacagtgctgggggtgctgaaagaggggacgcaaggctggggcaatgcagtgggacccgggggtgtcaggacaagcaagcagcccttaccatgtctgtgtagatctcgattgctcgcatcaaacagttaatggcctctggagagaaagggaggtgggaggagacatgagaaagtgaagtcgtttcagcagaagctgaggagaggaggcggacgcaggcgcacctggctgccagcagagagatcaataggcgctcagagctgccagcgctgccacacactctcaaggggctgggaagaaggggacggaatccctgagccccaggaaatctggtgagagggctgactctgcagactgtgacttgctgggcacatgcttctgggggagcccttctctcctcgggctgccaggatgctaccagcttcccacaaccccagggacagggcacagcagtgctaggccaggatgatggccagactcccacggtgttttaagacagacctgccaaggccctgctcttgaaggactgagctgctggcaaaggggaaggaggcatgggaggcggccaaaccagcatctgaggtggtcttggaggcaacagggtgccaggttctacctgggctctgccaccatctctgcaggatcctgagcagcttctgctcctgcaccaggaggacctggacctctggcacgaggaggctggatgtcatcaacactgagccctcagtgtgctctccactgccccctcttcctcgtagctcagcagtcgggagccctctgctcagtccctttaacctagtcctgccacccaccagctcctcaaaggttttgccaaaaaacctgaacacaccaggatggcactgaggaagaactgggctacctttgttgtactatctcttgcaagattttaaatttgggaaaggcttttttttgacaagttatttggaggagagagaaaagcatgagtgggaggcattttctagcagacagaaatgagctctcagggggtattttttaagaacaccattttagcacatctcaggaggacaggggtgttgtggggagggaggcctgggttggggagagggaaaggcagggagcttggacaggccacagggcatgggctctgagcttcagcctgggcatctgaaagttcctggtcaccgtgggggtctccatggtcacccaggccatgttcgcctgagaagagggtgctaccaagaagcgccggggctgggctcctctcaaggggctcacggtctggatgggactccaaactccctccgtggggaggcatctggacagaggctctttgtctcaggtctgtggctgggctttcagggagtccaacccctccttctgacatgtaaacagtggggtccataagcactcctctggggagtggggtctgtaggttttgtccaattcagaaagacctctggggatctaaaagggactgagagaaggtacagcactcagtccaggttctagggctgacagaccgagactgtggcagcagacagtggaaacggtggcaaaaagggggcagatgaggaggaaggggagagaacacaacctaaatccggcagtttgaagacacatacatcctgtaatcggcggacccagaagcaacggctaagccgggccacgctgcagaggagagcagcagctggagtgaggtgagaggcccgccttgccccgccccacctggctgcagtctccacatggaggccccgggctgctcactggttcactctcctggccggaacacccaggacaccaacctggcaccctgtgggctgaggcggcaaaggctgctgctccgcagtgagcagtgagatctgcagctgccacctgggcctgctggcactggctctggagcacccgccgtcagcatggcacagtccttgcagtagcagcagggagacagcttaccccccaggcagcaacatggactcacggggttaagtcccctccatgtctggaaagcggcgggccaccagcagacacctgggacagctggctcctggacgagcttctgacacactcatgactgctactcttatctcaggtcaccaggccttgtgcactcggacaggcagagcaacacccagttctgtggcctggcccctcctgtacccacccacagagggctggaaaggggctcagagcaatacagcccaagttggggagctatggcccaggccaccgcccatccccgcagtcactcctaccagcgacgcccaacctgacttctgcgtctctgaagcccttcctggttacacttggtcatctcctccttagtaaaatgggggcaaatcacagaatgcacaaagaaatcaaatgggttaaaagatgccaagcatctggtacacagtagaaacccagtaaatggcagctggggaggaagtgggggacaagcaggggccaggtcgcttctctgccccaggtacacacactgcccccacccccaactatcaggcaggcctgggaagaggcctcgctggcccgagtctgccctgagcagcagccatggttgggtaactgaggaaccaataacacatatgagcatcacccttccccacccagagccaccaaggtggcagcaggccaccctctgcgagagggagaggaattcgggagcccagtcgggcctcaggcacactccagctgccacttgggggcaggtccttctggagggagtcctggaggaagccctagaagtgctgacccaagacagaggccttctaggctgctgaggagaccagtgatgaggacggccccagggtaccggccacctgcttggggaagccaggcaaggttccaaatcgggcctccagcgctgtctcacaaggcacccggccaagggcagaggctgtggggagcccagggcaggcaggggcccctggactgatgaaagccaagggtgtcctgactggaagtttatcacacaccaggtgccgcgctgggcatgactgcatcatctcacagcagtctctgctttaacagacgaggaaacagaggcccaaaagactgacttgcccaggatcacaggggaggcagggtcctcccagaccacccaccacctgcgctgctgagccacacacagttgctacatgacattctctgtgaggcttttttttggggacaggatctcactatgttgtccagactggtcttgaactcctgggcttgagcgatcctcctgcctcagcctcccaaagcactgaaattacaggcatgagccactgcacctggccttgtgtgaggcctgactagcctcagacacaaagcagccactgcccttgatgccaatgtgccccttgccccactgggagtcatggctggcgtgcgtatctttaggctgtagctctggaagctgcactaacacccttccctgctcaacaccacgtccccagggctctggacacggcacctgctctcagctctacccaggtgaggctctcctttcagaactgccccctttcttccttgaaagatctcccatagccaaattcacgcccccagcctcagctctgtgcaagttggcctctgtgccctggatgtaacatcatctttatactttcctaccggtcggagtcctcagccaccttctgagcttcctaaggccagggaggggccacatccagactccaggcccacaccctgcagagtctcgctggagagctagaaaagctcagatcaaacgcaggggagggaccccaccatatcccactgccaggcagggcctgtctgcaggaagtgaggggtctgctgaaagagcaaatggcactctctgttcggcagcctggcgctcagtgttgccccagagtgtccttccagtcactccagatggggcagcagctgaacgtcacagatgctaagacagcacctctaggccaaccagtttcccagggagcagaaggaaaggcttggcggggcagtttaatggaaggcatggagactccatgtggtgaatcaagcttaaaaccaacccagggtctccctgggtcatcactgcatcaaccacgcagcctgctgtggcccagtgctaccagccaggcaagccccatggcccacccagttacaaggctgctcctcggcctcttgccaggcctgagccccaccatgtgaccactgaggccaacgcatgagatgcccagctgctgaggagcaactggtcagtctaaggacagagaagagctactggtcaacacaaattcatcctcatctgggaactaacacgtcagatcacgacaaaggggtatgccagcagttctcaaacacgccatgtgaaccagtgctcactgatccatggaggaagctccctgcactgctgcaaacctgtcttctcttgggaaggacaggcttttattccaagattatatagctgctttttattttttaaagattcatatattttccattcccctgagatgacagtgacaatagatggtcatttttaaaaactgcctgtgctttctaattagcaacctgtacctggcaccaacattttaaaaaataaattaaaattcccgccacatgcaagcaaacactgggctggacctcctcttcgggaggcacccagggggacaaaactgttttctcaccatgagtcagccccaaactgggtttctgtccctagcacgctctcattttaagtaatttgttctctggcaactacatctcgggctctgttctctctaattcctccccaggatgtagggaagccaggttgggctaatttccgctcctttttcggcagcaactcctacctggctggtctcagaatcctccccgccccccacaccgctcccttctgcatgttaattctgacaacagaacagattttcctctctccccggcaggcggtgggtctgcaatggaactcccactcccaaatgctccgggattgggaaggggtgatcagctgcaccgacaccaccgacacggtagataggggggcggagacttgagcagggcgcgaatgccaactggaaggaagagagccagttctaaagtcaacgctcactctgcctcaggcacgcccctgccagcctatcacatgtcggccactggaaaaaccagagccgccaggaaacctgaggaatcaatgcagggtgctaggatggcgctccggacagccagcccgtgtggcccgcagaggccctcaccttgggggtcggctttcttgaatgcgttgccagcgtccacaaagcaggtggctgcgtcgtgcttgctctggagctgcaggtgcagctgtgcagcctggcagaacgcgtttccagcagctggaacagaagagaagggcagtcctggcctcagtggggctccacactttatgaagccacagagacactgccctgggaggtgggtcgggctctcgagaatgcggaaagagtccccaagacaggacgagggtgacctgagcgagcccagaccgaggcctagaactcaggtctcctggctcctgcgctcaggtctgctggctcctgcgctgaggctcctggtggcccacctgacagtctctgagggcggcaggaagctgcctcgggggaaggccctgagccccaggtatatggaaagagagccagggtaagcccaggtaaaacaccatgtccctaatcccagctatgccagcatttccagggccaccacttctaaagatccaaggagaaggcagatagagctgagttggaaaggatataaaacagagtgaggtggcctcctgcacctcccggcctgggcagtcctccccaggggagcctcgaagcacagggcccagaaccaccactagaaggcaaagtacaggctgaaatcatggggtggcttcggaggggtattttgggaagcaaggggcaactgagattaaaccacataacatcttcccatctactcccctttccaagtcctgtttctttttccacagctccccaaagctcttcctgattctcccaactcctctgcctctgttcacattctgttcccttcactgcagatccccatggacaaggcacttgcatgaattgtgaggctcatggagttggggtcggacaacacagagccggctccctccaggagctgcatgtccagagagggaaacaggatgtggacagcaagaatgaatacatgcagaccagtgcccatgggcggagggcagaagagaccgtgcctgaagcctcatccatcctgtgctcatctgcacacggtcagcttctgtgggtcccaagccattctgcccacacatctcctaactgacgtttgggaggcagcagcatctctcctcctcctcgtgcagctgaccacctccagctcagctctgaggcttctccccttcattctcctccagctgaatctgagtcagagtttctaagctggaagaggaccaggaggcctggccctatcctcttaagttttgagcagcagaaaagacaaagccttccgggttttcactatatgatttcattattttcaagagttccaaatttgagtataaaattacggccaggcgcggtggctcatgcctgtaatcccagcactttgggaggccgaggtgggcggatcacgagatcaggagatggagaccatcctggacaacatggtaaaactctgtctctactaaaaatacaaaaataagctgggcgtagtggcacgtgcctgtaatcccagctagtcaagaggctgaggcaggagaatcacttgaaccagggaggcggaggttgcagtgagccaagatcgcgccactgcactccagcctggcaacagagcaagactgtctcaaaaaaaaaaaaaaaaaaaaaaaaaaaaaaatttcaagaaaaggggatattaccggggggaaatggcctagggcttttctttgaagagtttgggggcagaggtaacaaattttaggggaaaagcaacacctatgtaattaaaaaataagctttttttctctagaggaattttctaagtttgggagcataaaaatacaaaaaacatttggctttattcacaacgtattttgtgaaaactcaggaataactctttgaattttggggaaaccaacaacattctcaaaaacgatgataatcaattttattgtgcacctctgcaccctgcctccatggtcccaccaccaggttccctctcctccacagtcagaagttcctccctgcattcaaacactgggtctcttgccgtatttccttaattcaatcttggtgacatgaaagatgtatgatgaaatgagcctcgaaagggctcaacacactggcttgttggacttcttgggcctgcagggagctccaaacagatctccagcctccctgagcccaaggggctcctccccacccctctcctctgtgaagctatcctgcctcactggggcaggttaaacactcaggctctgcagtcagagccttggtttctgaatcttggttctgtcacttactagttctggcatcctgggcaagagactaagccaagcctcagtttccaaatctgtaaaatagggatatttatagactgacccttagggctgctgtgctaacgcaattaaatgatgagcacttaggactcaacaaacagcagccatgattcacgttgttattggaatcacctgaacatcctcccccagcctagaatttagacactgatggaagcactaaggaagttaccaggaaacctgaagttctgaatttaaggaggactctaagagctcatcaatccacatgggtttatctaggtctaataatctatttattcccatcctctctgtcctttcaccaaggccccatgacccagagtataaagtaacccagcaggcacaaaacaagagagcaggccagtggctttccgatgccggagagggcatacaaagagaaagggccctcaaggccaacctctcgggcaggcctgtgtgagtggaagctgagggaggaggagagcaccttggaggagctctagcggagatgacataccactccagtttttggccattttgaacatgtttgctgctctggcgtagatttcgcatgcttcctctattttggatgagcctctggggaaaaaggaaagaaaaaaaggagacaatctagtcggctatccaggagaaagcaagcattctgctccagtgccgggcacagacgtgcccctacccctcacccttcacctgtgaagccagcttcccccaggcctcttgagtctgtggcccccgcccctgcatacaatggcacactcacttcgggcagaccagctccctccgggagtactggggtagatactgggtgcttgctggggtagtggggcgaagagttcctgaccccaccacaaccccagggtctgacagcctcttctacttcctgcctgggatactaggggcccactgggtcccaggcgcgctacaaatcccctttccccgggagactgcaaagcattctgggggactagcccagtttaagacatcgtgttgctttcgcagaggcagccttaatcctgtgccttgcactctgtggttgctcaataaagaccttgcagccctggagtgtgtcattaccagctcaggactgggcatatatatcacacagccatacaaagaaatgggaagcactattttaaagtgtagatataagatgttcccatttgtgtttaaaaaaaaaagagggtgggctgggtgtggtggttcatggctcctgtaatcccaacactttgggaggccaaggttggcggattgcttgagctcaagagttcgagaccagcctgggccacacggcaaaaccccaactctacaaaaaatacaaaaaattagcagggtgtgatggtgcacgcctgtagtcctagctactagagaggctgatgtgggaggatcacttgagcctgggaggcagaggttgcagtaagccaagatcacaccattgaactccagcctggacgacgacagagccagaccttgtctcaaaaaaaaaaaaaaaaaaaaaaagagaaagagagtgaaaataatagaaacatacatgtttatataaacataggatatttctgggcaaatacacaaaaacctagtaacagcatttttctcttaaggtgaagcctgcagaaggagggccaggtgtgggaggcagacttattcactggacatcccgtatttgtactgtctgaatttttttttaactgtttgtacatcttttcgagaaaaaaaatatatacatatatacacacacgtgtacatatatacacatgtgtatatatgtgtatgtgtatatatgtgtgtatatatctatacatttacacatacacagacacacacacacacatatttttaagtattaggatttatatttggccctgtggtccagcaatgaattacatctctagcaatttatcctaaaaaaactaatcagaaaagttacaaggatgttcagcatagcattatttaaaacagcaaaaccccccaaaaacttattgtccaacagtagggatacactgggagatagacaggaatttgaaaacataaagggtaccctgtttgggcagcttcactctggcttcttgacctccacatgtacataatgagcctcctcttgacttgggggacctcattagtacctcaaacccgtaagtcccactgcattcttctgcccttaataatacaaccaggcttagcccgcgaggtctgtagtctctgtaactgctcaaactcccaatatctacataatcagtagaataaaatccacacactctggagtcccaccaaatggatttcagggcctctcttcactggcataactagtgtttagtttatttttaaggaagagaaaagggaggagtgggtactttcccattcaaatcatcctcaccatcccatcccacaccctgtgtcaactggcccaacattatacctgggaacttgtccacaccaaccccagctgtggaggggctcaaaggtaattttgggagctgggatgtgagcattccttccctctgcactgcggattcagtgtgtccaacctgcccatccctttcagccacatgaagtgctcatttcatcaaaccagagtcccacagccacacactttgggattcgctcagtagggtctggatggggcctgcaaatgagatttttaacaattggggtttggggggcccaggtaattcagctgatcaggtgagtttgagaaggaaaaattgactgagaccgactacctggaaagcagccaccagcgatcagatcagcggccaggcctggcaatgtcagcaggcaaataaatgcccccacggtgggcgggctggttgggccagggatcctggcctcctgaatccacatcacaccaggtaaataatctatttattcctatcctctctgtcatcttgccagatgaaaagcctaccctctgccttctggggctgtgctgatgctgtcccccaccctctgctgtccctgggaagtggccctgagcaatgtgttcttcccgcactcgccctgctgcactctgtcttccctcacccacctcacctcagccagcccaacacaccttgggccttgtttggagtgacttcttttttttttttttttttttgagatggagtttcgctcttgtcgcccaggctggagtacagtggcacgatctcagcttactgcaacctccaactcccgggttcaagcaattctcctgcctcagcctcctgagtagctgggattacagatgtgtgccatcacaccctactaatttttgtattattagtagagacagggtttcaccacgttggccaggctggtctcgaactcctgacctcaagtggtccactcgcctcggcctcccaaagtgctgggattacaggcatgagccaccgtgcccagcctggaatgacttctttagaacccattcctggccttggagaggtaagaaactttcaaaaccttctggctgagaatcctgaagggtcctttggggcctggctgcaaaaaaccctcagaaggaccttctctggaatgttctcttaaagggacattttcagaccttaatcacaggtctgcccaccccacaggtcccccagctcagccttcccttctttttgagtgtgactaagtcctatccagctccatgcactctctgaaaaagcacagaccctggatgggcagaaatgacccacgtcactgagtggcccacagcgggcaatcaacaatgagcagagtcagcccagccgggtttatttcaggacggacacaaagcctaccagctgcccgggctgaaactctgtgatcccaggctaagcacagccaaccctgcacggggtcaatgattctgtggggtggaaaggccagagggattaacacctgctcaggccccaggcttgcctccttcttcccctgcaccccgcggtcttgcccattaccatggccaggggatgacaggagatctccagggtcccatcctcttcttttagaaatgggagtgaagtccccaaagggggaaagtgacgtgcctaggttccagtggaagatcctgaagaagccattcacatacacatttattcacctggggaacaggtatccgagcatttattacgtgccaggagataacaacagtacacgaaaggaaaatctagctgggcctcctctcctgagggcctgggtggcagcgcatgtgacagctgactgtccctcccccactgacctcccccaagctgcctctgcttcactcctcccatcccacggctctgagccactccgggaatagagggaactggtttgggctgcctgatgcagggctgtctataattacccgctcagctttgctctctccccctccaaggcggaggaaggagtctcaggtctcccaaacacagccaccaacctcagggactgccatatggaaggctgggcactgccaggaatacacagatgcctgatgggacctgggccagggggttgtgcagggcagagtcttagccccctccttccttcctccatccaccaggcacttcctggctgccagaaatacaccatgccctgagacccaccacctgcagctcccgaaggacctcacgaggcagggtggacaaagtcaggcccccatttcgggtcctggactcactctatctctcttgcctctgtggaagccacagccacaggcctacggtttcctcctcagacttaaggcccactgccccaagtctccagtcagcaccctcagtggggaaggtgtcctagggcccgtcacatgcctgtgtcttccctgtaagcccacctcctgcacggctctcgagaccatgtgccttaatcacggctggcgcatggcgttccctgcctcccaggcactcccctggaaggagcccacagctcctcacgagagccctttgggtgctgcccttgctttacaggcgaggaagctggggctcagagagggcggagggcttgtccaagcttaccctgccaggaagcagcagggcttggaaagaggactggggccctggggatccagtcctgcccttgcctctcactcagtgatcaggaaggcttccttccccatgcccaaggctccttgggaaaataaggagggaggacaaggtccctgcctgcccccacccctcctctagattaaagaagccagggagcctgtactgcctaggcttccctcatctcacgagcagaggctgctctctgctggggctgcgtggagcatcctctaggcaaaggagtatgaattaagccagccccctaccgagcctgccagtaacaagccaacaggcagaaggaacgtcagaaaaagttaaggctgcctgtggtgcagggtccaccctggcacagggagccgggggccaccagccctgctagtccactgactgcactggagctgggagctgccagaggctcagcatcctgaaggcaccgccaccagtatcacctggaagcgggaaaccaccagctgcctcccgccactctgcagtgggccttgcctgaccaagcagagtatgagttcctgcagggcggggcctgagcccagctctgctttcccatctctccacaagccccagttaacaacggtgaaagaataaagtgtcacaggctaactgcccagctctgaaatcgccacaggaccctcttgtgacatgcctgtctgggcaaagacaaggggtagaaagagaatgactttggggtggcgagacctgggctgaagtccgtttcaggtactttgctaagtgttcgacctggggctagttatccctgaggctttttttttttaaataagagatggggtctccctgtgttgcctacactggtctcgaactcctgggctcaagcaatcctcctgcctctgctcccaaagtgctgagattccattctttatctacaaaatggcagcatgtctggccacagtggctcacacctacaatcccagggctttgggaggccgaagcaggagggttgcttgatctcgagtttgagaccagcctgggcaacacagtgagaccccaactctactaaaaattagccaggcatggtggcatatgcctacagtcccagctacttgggaagctgaggtgagaggatcacttgagcccaggaggttgagactgcaatgagctatgatcgcgccactgccctccagcctgggcaacagaacaagaccctgtctctcaaaaaatgaaaaatgaaataaaatggagacaatgaatctggcctgggaggagtctttgtgaggattagaaatgacacatagtcaatacttggcacagagcgcagaatggaaaaggtgctcaatggttgctattacacaaaggaagagaaatacgctcaaaggggtgcctgccacccaggaatgggaattctagagagtttcttgtggtggtaaaaataaaataaaataaaataaaataaaataaaataaaataaaataaaataaaataaaataaataaaataaaataaaataaaataaatgctgacagtagtcagacaggcctggcctcagcgccagctcatcgtgtgccagcctgcgtttccttatgtgtaactaggcataagactccacaccttgcagggctgctgaagcacgagcaatcttgcaggcagcaccccacggcgtgcccagcagagagctggccacaccacgggcgttcagtaaacgagagcatccctctcatcaggccccgcagaggaccgattccaggcacgcttccctacttcagaatagcagcatgggcttcatctccatcccagattagctaagtaatgctcctccttcggcttccagagtcctggcctcccatgccccaccccttactgcacaatgctcaaaatacatacaggcccacggcccttcgagatgagctcagagccaggatctcacctgccacacggcacacagcctggcaggcgccctgtttcttattttcttatacggatgccctcctgcaccccaacgggattacatttcaccacagaccaagggcgaatgtacttcctttttcttaaaaggtgttctcaaagacccttgcctctcagtagccccatcccaaaaaggagacggaaatgtttgtatggccaggcagcaaagtcctatccatcaggaaagccaggaactctcggattccccagaaaccttgtgtgccctcaggaaagactccactctgagactgggcaagagatgccaagttttcagttgtggatcttggcagctggcagggcactgtgattcaccagggtgcccactggaaatggcgccggggtttctgcacgctctgcagaggaaggcggtctggagagaaatctggaagctcgtgcccacaccagtctcagccaaggccctgggcaggccctgtacagacaagctggccctcccagggtcccgccgttattgcctacaggtagttcaaacaggaactgatttgtcaagatctgatcttaggaatgcactgtttgtatacagaacaccctctgccacctatttctccagcacttctagctcaacttccaatgacaatacctactaataaagatgacagtgagcccttaataaacattagcagagccaggcaacgtgctcccaccacttcccacacatcgtctcatttatccttaaaaccacctgaggaaacagttaccatgattttcatttcacagatgaagaaactccctctacacgtttgtatccaagaggaaggaagtttttattttggctattttggggacaggggaggtggctgggaaacatcagggatgaggaaaagccccagggaacagagccgccattcagaacctgcaggatccccaaacggcacagcaggcactctggattccccaggagacacgcagcagggaggaggaactagtgtgcctggactcagccatccccttctgctgctggctcactgtgctgtagttaggaagtctccgtctttttgcttccagagcagaagtttgagctgcgcccccatcaccaaggggaggaacaggtatggctttgagcttctcctaactggctggtgctgtcgccttcagtggctgctggtgcatcaaagccccctagcgtctggcagcccagaaataatgaagagcaagggtggcatctgagcaccaaggcaggcgacagcacagacacccatcgccttgcgtcccaggtgcgggctctctgacttgccctttgacaggggcagaggcccctcaatgtgggatgctgtcattgctggggttcccaaaggggaagggagaggcaccaaggacaagctgagccgcaacgctcccttctccagtcccggcagctaccaaggaccttgaataaaggtgggttatgaaatgttgaacacaagcaaacccagatcagagaggaggaggtgcctgagtgattcccgcccgccaagcaggtcctcccaagctggcctctggctgtgctcccagctcccaggcacacaagctccggtcaggccagcctcccatcctccctgccctctgccctaacctcactcatactcccacagcaccaggtcagctcctctgggagctggaaggaactgagatgaacacaccagctctttttttcacatatttggagaaaacagccatgggaggacagttaagagggtggcagctctccaacacacctagtttgccaacatccttcctaaatgtagtgcccagagatggtcatgaaccttgaggagaaactaccgtggtagcacagcaaaggggctaagtgagaaggctctggaatcacacagaactgggtttgaatgccacttctcccacttactgtggggctgggcaaataagtcaacttctctaagcccccaagtttctctacctccacggggattttgtaaggactaaatccataccatccatcagcaggttgagcctggcccaggccagggtctgagtcagagcgagcacttaataaccagcatctgctagtattaccggcactgcaacagcctcctgctgtcactctcccccacaccagctgctgcagtcctttctagaaggcaaacaggagctcgccaggatgggcctcccttagcctcctcggagatcttcagtgcctcctccaggcccagcccttgctcaccagaccttccttgtctggcctcacctgccgcttccacctttatggtctaacgtggaactccctgtgttccatcttcctaaggcatgctccataataatccttgcctggagtgctgctccctgccagagagcaccccagaactcatgttcatccccccagggttggggcctctcccccaggaagccatttctgatccctctggatctcagttccctgtctttccaggcagaacctcccgtcacggtagatctctgttgcaccatccctgctgcctagagcaccctccccggccccactccccagcaagtcctgggattccttggggcccagctcactcctcaccaagagcctccccctggttcacgctgcttcctctgagctcagacagtcacaggaatgacatcatcgagcccctccttacagtaggtaattccactttattggtgtttgctgttcatcctgccttcccaatcaggtagcaaatgccttggggctgacttagctgctccctccaagcacacagtccaacagcccactaatccctgggccaaagggaccagacacccagagccacccaggaaaactatcaccaaaaacccagctcgtggccccacccccaaacacagcacttgaacttctccccttgtgaagaaaaagaaacacacacacaccctctctctcctcgcagcctctaaaataaaacatttttcacctaatcaatccagtccatcagccccggatgtttctccacaccaggcaattcgccatcatgttcttcaagttattttgctaaacattatccaacctcaaacaaggggcgtggcctagagcccttttcctgttccttcctctcttgtaaagatccctctccttcgtgtcttaccagcctctgccaggctcctaccacagtctcttcccatccccaggccctcctcccaaacccccttctccagccttctgcagatgttcccagtcccaccaccgtccccaggctctgcttctgagtggccaccacacactgttctctctacaagcccactagtcctttcccaggtctcctctcagtttccacaacctccccttgaccctttcgggtcgtcccatcagcacagatcccaccacctcccacaccaccgccccctgccaaactcccttctccttcctctgcccagagcctcatgctcctctcaaccctactaagtcttcgtggatcccttttctgttccctttcagctcctcttagcacactcatgtttctcagtctctccctctcctgacccctcccagacctctccgctcgggcgtccaccttgaacccccatcagctctctgcacgctccgaacctgtttccttctggaagtcacattaacaacagctaacactctcagagatgtaactccacgccaggctcaattctaacactcatagcaaatgggaggtaggtttgatttgtgatctcctttagcagggagactaaacaatttacccaaagtcatgaagtaagtggcagagctacttgggctcttggcacttctaagccactacaatttatcacaggatggtcgtgtcagcttttaggagctaacgtgagttttatgccacgtcatatgtgttagttctgtctcccaggccttttcccatccctcttctcagcatgtctctgtcatccctattactcgaggatcacacagcaggaatttgatcccccgttttggttctctcagtccccctgtctctccctgttatccctccatctccttggccaagccaccaccacgcattcccccacccaggagtctccagcctcaacccaggcctcctcaggcttttttctttctttctttctttttttttttttttttttttgagacagagtctcgctctgtcccccaggctgtagtgcagtggctcgatctcggctcactgcaacctctacctccgggttcaagtgattctcctgccccagcctcccgagtagctgggattacaggtacccgccaccaggcccagataacttttgtatttttagtagagacggggtttcaccatgttgtccaggctggtctcgaactccccgcctcagataatctgcccacctcggcctcccaaagtgctgagacctccacagtcttgactccatcatcccgggttcctccgttcagctgtccttaaactagtcactgctaaccagggccgtactcaccccatgcaccccccacacttcagacgcggctcaccgctcctaggatcatctagccctgagcccctctgcctggtgtcagcccccttcagccttcaccctcaccgcccagggcccacgcaaatccactgctccaggggttgaaaaggtcagtccctcgggcaggcgtcctcagccccaggccccatcactgccgcctgagagccttcaaacagactcccctagagctccgaaaagcctctggacctggcttctctcccggactccctccgtccccccaggccggtcccctccaaggcttcaggacgtactccctcggtccaggttctcccccgcccgctggcctgtcttcggcctgggtccccttcctcgcctcaagatagtgtcgcctcggtccgtgtgtcctcagcccaaatcccttccgccatgtcagaccgtctctcctcaaaccgtgttgccccggcccaggctcttggccctcagcctgcgtcccctctgccgcctcaggccatgtcaccttattgcaggttcctctccgtcccctcggcccgagctctgcgtgccctaacccgccacctccgagcgtgactccttcgtcctctcagcctaggtcccggccgacccctcagcccggttctcacccaaagaggccagagaagaaggactgcgagttcttcactttgcgctccgcctcggccaacagcgccatcgcctccgcttccttcccggaattgtccatggcggccacaaagggactcagcaaagcgcctgaccctgaccctgggaagactcagccgcggccgggccgcggaacacagatcggtaaaactcgcccggctgcgttgacgtcgcaccggcgcgcgtcgcttgcggccaggaaccacgtgactagcgctggccaaccagcggcctcgtaacgccgcgcccgctccgccggacacgcccccaccagccgccgcacgccgcccgtgactcgtgaccccccaatcggcgtcaagagacctcaacgcatgcgcacataccggcgaacggcgctccactctctccccagcgctctgtacctcacctcccacgtgaccctgtggaaggcaatggcagtaccccccgccgaggccccgccccacggtgttgctgctggatcctcctccaccaatcagcaggagccctcggctcgcgctggggcggggggtcccccactcgccctccccgcggaactctggcacagtcagctgaccgcagacactcacgtgacagctcggggcccacgcccgggtttgacagttctgcgcagaacttagtcccgcccccgcggctggtctcgccggtttcttcacttggaaaggcgtttgtgggaaaaggaaaccgttctgctttttcttgctccctctgtcggccagtactagaactgctttggggagaccggtgaagagagactgcaaacaaaaacttaagaggttctctaactctggtttcataaaaaatagctgaagagggccgggcacggtggcttacgcctgtaatcccagcactttgggaggccgaggcgggcggatcacttgaggtcatgagtttgagaccagcccggccaacatggcgaaaccccgctctactaaaatacaaatattaaccgggtgtggtggcacactcctgtaatcccagctactgaggaggctgagagaggagaatcgcttgaaccggggaggtggaggttgcaacgggccgagatcgtgccactgcactccagcctgggcgacagagtgagacttagtctcagaaaaaaaaaaaaaatagctgaagagagcgtgttaaaaaaaaattcagattcgaagatgggcgcggtgtctcgtgcctataatcccagctactcgggaggcgagaggatcgcttgggcccaggagtttgagtctagttcaagtcccgccttgggcaacatagcaagactctgtctctaaaaaaaaaagtttaggctcaaacacacctcctgctgtcccagaaaattgagttgctggtttctgagacagggtctcactctttgggttgttggttttggagacagggtctcggtctgtcgcccaggctggagtgcagcagcacaatcatagctcacctcagtataactttgtagtgccagaaaggaaggaagtattccacacgtgtgctcacacacaaaattagggggtatgccaaaggagccaactgaaagaactcccaatggccaaagctggaacaatttgagcatcaaaataaagtagtattggattataatcccaaacataaagtatccatgagcctatggtcatatagatgaatatagaacaaataaataaaggggggagaatagacaaatagtttgtgcagaagaattccaaataatctgcgtagatactctgctctcaagaaggtgaaggatacctccccattctgtaagtatggactgtgcatagtgacttcctttcaaagaagagggtacaagaaaggggagaaaaagcctaaatttacagtggagaaacctgacattgacatctaggtgattgaggttaacctcaacattgataagtcatgtgattaaaatggctctttacttctgggatctttcaatctaatcatgaaaaaaacactagacaaattccagttgagccacatcctccaaaatacttgcccagtactcctcaacactgttggtgggtgcagtgtgtcacatctgtagtcctggtactttgggaggccaaggcaggaggatcacttgaggccaggagtttgagaccagcctgtccaacatggggaaaccccgtcgctactgaaaatacaaaaaacttagcccggtgaggtggtgcatgcctgtaatcacagctacttgggaggctgaggcaggaggatcacttgtaccctggaggtggaggttgcagtgagcggagattgcctcactgcactccagcctgggggacaagagggagactccgtctcaaacaaataacactgtcaagtcatcaaaacaaggaaagcctgagaaaccatcacagccaaggagacgtgactgctaaatgtaatgtcttaccttcggtgggatcctggaacagaagggcattgagttaaaaaaccaaggaaattggccgggtgcggtggctcatacctgtaatcccaccactttgagaggctgaggcgggtggatcacctgaggtcaggagttccagaccagcctggctaacatggagaaacactgtctctactaaaaatacaaacattagctgggcctggtggagggcgcctatagtcccagctactcaggaagctgaagcagaattgcttgaacccaggaggtggaggttgtggtgagccgagattgtgccactgtgctacagcctgggtgacagagtgagactccatctcaaaacaaacaaaaacactaaggaaatctaaataaactatgaagtttagttaataatattgtgccatactggttcatacgtggtaataaatgtaccattctaatataagatgttaatcataggggaaactggggtatgtgggaatttttttttgctgtcattgcagtttttctacaaatctaaaactatcctaaaaatcttctttaaataaaacagtttccaaggccgtacccacaatggttccaattctgagtctgtggtgggtcacaggaatctgcatttttaaaaaacagaaccctatataattaggatgcagccagacctggtggttcatgcctgtaatcccaacactctgggagaccaaggcgggaggaccgcttgagcctaggagttaaggaccaacctaggcaaaaagcaagatcctatctccacaaaattaaaaaaattttaattactccttgggaggctgaggtgggaggattgtttgaccccaggagtttgaggctgcagtgagctatgactgtgccactgcactccaaccgggacaacagagtgagaccctgtctcatctcaaaaaaaaaaaaaagtaaaattaggatgcagataatcccgggaccacagtttgagaaaccgctattatctagggggttggctgagccgagcaaggcataagaagccttcccccaactctcttcatacatgaatagacttgcctggaccacctacttgtggttgccactgtgtcctgaccacagagcaggtgggggtgagcctggattaccacaagcggttttggttccatgtctgtcaaagcaacactatgtaaaagcttctgtttaagctgttccatttcagggtaatttgtcatgcagcaacagataatataacccctcagccttttcaaccagggaatttttttccatttccagagttcattggatttatttaggatgggatccaaacaatattagcaatcacatgagagcttgttaactagtagccattcagttcttatggtgcaccctcccaagtgcttaatttacattttatttctatttatttatttattttgacatggagtcttgctctgttgcccaggctggagtgcagtggcacgatctctgctcactgcaacctctgcctctggattcaagcaattcttgtgccttagccacccaagtagctgggattacagtcatgtaccaccacacctggctaattttgtattttatatttttagtagagatggggtttcaccatgttggccaggctggtctcgagctcctgacctcaagtgatccgcccaccttggacttccaaagtgctggcattacaggcgtaagccaccacgcctggccataatttacattttatttaactgataggttgcgggggttgaggaggggcaattttcatcccattttacagattgagaaaactgaggctcccacagggaaagtgattcgccctagtttacaaggaggtaagaggagccaggatggaattgaggttcatctcacacctgaaccctttcccttaactgcagtgttccaactgcttcaaactcagcgtccacctctgccccactcccagccaatctttaagccttagctgataggtgggccctctgtgaaaccttctcacgctgccgtctactttcccagctcttcagaacacggctcaccctatcatagacacgatcacaccctgatgcaatcaatcctctgcagtcaattccccatctgagctaatggcatcaactacagctgctcaggctcaaacctgccctgctggccttgatctgtcctttccttgaccacctcccactgatgtgtgagccactgacaactctgtcgcccaggctggagtgcagtggcgcgatcttggcccactgcaacctccacctcccaggttcaagtgattctcctgcctcagcctcctgagtaactgggactacaggtgttcaccatcatgcctggctaatttttttgcatttttagtagagacggagtttcaccatgttggccaggctggtctcaaactcctgacctcaaatgatccacctaccttgacctcccaaagtgctgggattacaggtgtgagccactgcggagcctacctttcttttctttctttctttctgatggagtcttcctctaccaggccgaaatgcagtgacgcaatctcggttcactgcaatctccacctcccaggttcaagcgattttcctacctcagcctcccaagtcactgggattatagtcatgtggcaccacacccagctaatttttgtatttttaggagaaatggggtttcaccatgttggccacaatggtcttgatctcttgacctcatgatccgcccgccttggcctcccaaagtgctgggattagtggagagagccactgcacctggccatggagctgcatcttgagtggtctaggctaactgtggtcatttcccttctcactaacagggatcagtttagaagcgaacacaggctcaatgagacatacgggcatctgctgggagctgttaaaagttttcctcactcttaaaaagggaggcagggaggggggctgttttctcttctttcccccgccgcccgccccctgccggtctggattttggttcgaggttattctcgcctctgctggagccctcgttctgcccctgcccctgcccctgccaggggtccctgatttcaaggctgagcccctactgggacagccaaactccatgattgtttaaatcaacaccaactcttctgttacagtcaaaagcatttccagtaccatgacctaaaatcaccttgtttgcttattactgctaccttcctgctcctacaagagaaggtccgtgaggaaaagggcctctcttgcttcactatccctgttgtacggattggcaacgtccagtgcattctacagcaggtgcttcgtagatgtttgctgaatgaatgtccaaatcaacatgcccgtgttctccccaaggcccccagcccccagggcaggccacagctgactcacctcctgcccttagcacgtggtggggttcctaagcctttattggatcaataggcagggaagtcaaagacagcagctcaagaacccaatttaatcagatttacgagttgacatgtacaaaaaacaccgaacaatgcagaattcatcgcaagactagggactgaatctggaaggtagagtccccgccccagggaggggcccagcgtgttggagatctcaaggttttttcccactgattctctaagtcttggccttatctaacacatgaaaccaaaccccacaactgaggctaagatttaagagctacccagagctaaattttcccctccccaagcctccctgctctagaagtggaagggaaagaaggggagagactatgaacctaaggagagtggagcctccagcaccaccggacagggactgcatagctgtccgacaactgagctcctcctgcctatctgtggccaaatgccctccatgtttgcaggcaggttggccaacaggggacagggagggtggggggaggcagaggggtgccccaaacgccctggagaggccgaagggaggaggggcagcactggaggccccattcggacttgctgccacgggagtcaccactgcagggggccgatgtcagctcccagctcctcttcctttagctggaagggcttcactggccacttcaccctgatgatgggctccacgtggtcctgaaggcggtgccgcttcatatgggcatttcgactcttgatcttgtcaaacaccctgaggagtcaccagaggacatggggtcagagcagggaggaagggatcacaggggctgaggctgggagccctgggagtgtttccaggagaaagctgggtacctttcacactctctgcatggaaaaatgccctggctctctgcacttcccaacagctcgggggtccgcttggagcctgcatttgggctggagctgaggatggactccctcctataactcttggtctttaacttgggagttggatggtggctgggtctctcccgagggctgcatgggacctgcagagggagcaaaagtgacataagggtgctgacctgtcctgctgtaagagagacacagagctgggggcatacgtgtctcctgcaggaaaacccttccatcaggagcacccccgccctctgaccccaccgtccaactcaacgggtagcaggcactgggaggagagaagagctcccgacacagccctggttcctctaccttttcctctgtcctttccacttcctccggctctctcttgaccctcttttctagccctggggctcggccacagtcaaacttgatcatttttttccagatgtaataatactcaacgcactgagctaccgtctttgtctggatctagtgaaagaaaacaagcaggctgtggctgtgccacgcgggccctgggagtgtgaccttgccattgggccggccgcctcctttggaaagccctccggaagcacctcttcctttggcttggcgttaccactcaccacaaaggcacaggaccacaaaatccttcctggggacgagggcgttcaaactggagccacatagtagccaccagtacctaagcctgcacactctgagcagccattccagctcaggaattctttcctaaggaagatgggcacaaaggttgcaccagggatgccaactgtgacatcatgctaataaatcggaatgctctctgcaggcagaataccacacagacattacaacagctaggcagagcctctaaagtcttggcaggaagtgacccactctagaagaaggggaggttttgagtgcacagtgtgaacctaggggattattttcccgttcctccactaagaaaggatcccactaaaaataacttctgttaaaaacaaaagggaagctgggcttggtggctcacgcctgtaatcccagcactttgagaggctgaggcaggaggacgacttgaggtcaggagttcaagaccagcctgggcaacatagcaagaccccatctctacagaatttttaaaaaattagccagtcatggtggtgcatgcctgtggtcccagctacttaagatgctgaggcgagatgatcgcttgagcccaggtgttcaaggctgcagtgagccttttttttttttttttttttgagacagaatctcgctctgtcgcccaggctggagtgcaatggcacgatcttggctcactgcaacctccgcctcccgggtccaagtgattctcctgcctcagcctcctgagtagctgggattataggtaccctccatcatgcccacctaatttttgtatctttgtagagacagggtttcaccatgttggccaggctggtcttgaactcctgacctcaggtgatctgcctgccccgacctcccaaagtgctgggattacaggcctgaaccaccgcacccggccagcagtgagctatgatagtgtcacggtactccagagcgagtatcttttttttttttcactgcaacctccacctcccaggttcaagcaattcctctgcctcagcctcccgagtagctgggactataggcgcgcaccaccatgcccagctatttttttgtgtttttagtagagacggggtttcaccttattggccaggctggtctcgaactcctgaccttgtgatctacctgcctcagcctcctaaagtgctggcattacaggcgtgagccaccgcgcccggcgagcgtctcttttaaaaaaaaaaaaaaaaaaaaaaaggaaaagtttaattgctctaggaagaaaatttcttgggaaattaaatcggctattgagcgaactccagaaaagacattctccacccaaatgtttttcagctttgtgagtattcacaaacgaggagtcaaaacagcacaaactctgcctaagagacatcactaagtttaaaaaaaagttggacttctgcttctgaacaagatggagcaacagaaccagatttaccctctcgtccaaaacaatgaaaacacagagtcaaaatataaacaatgtttggcaagacaccaggcgtcattcaacaaagggcagtgaaccctgacaggaagcaagctgccaccgctccagcttatcaacttgtgtttccaggccaccacccaggcaggggcaatttaggcagaacccagcaggacttagggagctgaggtggagcacagtgcctccggagaccacggcggtagagcccacaggacagaggatgggagaggagagagctacacacagaacattccagagatggggagcaaatttcccccaagaactcacccaaagactgcccagcacatgcatgggaagagaccagccaaagctgggcaaagagccatccaaaaggatgagaggggaaagtgtgtgctgctcctacagggccaggaagagtgcccgttcccacagccagagtgggaaattttatgatgcagggggcactgggtagggcagtgacacagtcttgcctcagtaaggagaaataatcagccttagagaagagctatgctggtcccatctaaaaaatctaaaactgaacctaaaagtaactgtgtcccagaacaaaactcaagaatatttacaaggctgcaaaaatatccagcatccaacagctaacattcacaatgcccgtgatctggtgaaaatcaccatgcacgcaaagacgcaggataacacggcacatcaggaggagaaaacccaatgtatcaaagtcaacccaccagagacacaggtgttagaatgagcagggaaggacatgaaaggttaccataactgtttaatatatgttcaaagagttatgccagaggccaggcgcggtggctcacttgaaatcccagcactttgggaggccgaggcaggaggatcacctgaggtcaggagtttgagaccaccctggccaacatggggaaaccccatctctactaaaaatacaaaaaatttagccgggtgtggtggcacgcacctgtaatcccagctactcaggaggctgaggcagcagaatcgcttgaacccaggaggtggaggttacagtgagctgagatcgtaccactgcactccagactgggtgacatagcgagactctgtctaaaaaaaaaaaaaaaaaaagagttataccagagctaggtgtgattgcacacacctgtagtcccagctactcaaagttggaggatcacttgagcccaggaggtcaaagggtgcagtgaactatgatcacacccctgtactccagcttgggcgacagagtgagatcctagatcttaaaagaaataagaaccagtaaaaccttcaaaacactgctaagagaaattaaagatgatgcatagagacacagcccctgttcatgagtcagaaactgaatgttgttagaatgtcaactctccttggctgggtgcggtggctcacgcctgtaatcccagcactttgggaggctgaggcaggtagatcacctgaggtcaggagttcaagatcagcctggccaacatggtgaaaccctgtctctactaaaaatacaaaaattagccaggtgtggttgtgcgcacctgtaatcccagctactcgggaggctgaggtacgagaatcgcttgaacccgggaggtggacgttgcagtgagtgaagagcgcgccactgcactccagcctgggcaacgagagtgaaactctgtctccaaaaaaaaaaaaaagtcaactctcctcaattggcctatagagccaatgcagtaccaatcaaaatcctagcaggttttttgttttgttttgttttgttttttttggtaaaaatggataagctacttagaaagttcatatggtaatacatgatcttaagacttagaaagctacagtagtaaaaacagtatggtattacatttttttgtcttttcaacaaaaggtacaaatgaatatccacatgcaaaaaatgaactttaactcatactttacaccatatacaaaaattaacacaaactgaattgtaaacctaattgtaaaacctaaaactataaaacttctagagaaggccgggcaaggtggctcacgcctgtaatcccagcactttgggaggccgaggcgggcagatcacgaggtcaggagatagagaccatcctggttaacacggtgaaaccccgtctctactaaaaatacaaaaaattaggcgggcatggtggtggcatgtgcctgtagtcgcagctactcgggaggctgaggcaggagaatggcatgaacctggaaggcgtagcttgcagtgagccaagatctcgccactgcactccagtctgggcgacagagcgagactccgtctcacaaaaaaaaaaaaaaaaaaaaaaaacttctagagaaaacaaggggaaaatctttgtggttgggttaggcaaagaattcttagatacaacaccaaaagcacagtccataaaagaaaaattaataaatgacttcatcaaaatgacaaaatttttctttaaaagacattgttaagagattaaaaagctacagattgggagaaaacattcacaaagcatggatctggataaatgacgtgtcctgaatcaataaagaactgctgtaactcaataataaaaacacagccggctgggcgcggtggctcacgcctgtaatcccagcactttgggaggccaaggtgggcagatcacctgaggttgggagttcgagaccagcctggtcaacatagcaaaaccccgtccctactaaaaatacaaaaattagccaggcgtggtagcaggcgcctgtaatcccagctactcaggaagctaaggcaggagcatcgcttgaacctgggaggcagaggttgcagtgagcatggattgcgccactgcattccagcctgggcaacagagtgagactccatctcaaaaaaaaaaaaaaaaaaagaaaacacagacatctcaataaaaacatatgcaagagatatgaacagacacctcaccaaataaggcatacagacagcaaacaggcccatgaaaagatgctcagcatcgtcagttgtgaaggaaacacaatgcgatgccaccacactgtcatgagaatggctggaattaaaaggactggccctacccagggctagcgagtttgtggagcaactagaaatctcttttcctgccggtaggaatgtgaaatgatacaactactttggaaaattgtttggcggtttcttaaaaagttaagcatacacctactaagtcattccattcctggtatttactcctctagaaaacaaagtacatgtccataccaagactggtacctgaatgttcataacgaatttatttatagtcatcccaaactggaaaccactcaaatgtccaccaacaggcaaatgattctttaaaccgtggtacatccacccagtggaatactattcagcagtgaaaaggggagacctatcaatacctggaacatggatgaactcaaaatcatgatgctgagtgtgagaaagctggaccaagtagagtccatactgtgtgactactccatttatagcaaactctaggaaatgaaaacgaatttacagtgccctggcagatcagtgctgactgaggacagggggtgcaatggggagtgattactatgtggcaggaggagattcagggctgagggacatgctcattatcttgactgtggtgatggtttcccaggtatagtatcaatatgtcaaaacttagcaaatcttattatactgcaattatgtgcaattttgtatacatccaattttttttttagaacagaaaataagcagcaggacattatatgcagtgagatctcatcctttggcttttttcggggtggtgagagtctcatcttgtcacccaggctggagtgcagtggtgcaatcttggctcattgcagccttcacctcctatgctcaagcaatcctcccacctcagcctcccgagtagctgggaccacaagcacgcggcaccatgctaggctagtttttaacttttttgtagagacaaggtctcactatattgcccaggctggtcttgaactcctagcctcaagcaatcctcccaccttggcctcccaaagtgctaggattacaggcgtgagccactgcgcctgacctcatcctttttttctttttttgagacggagtttcactcttgttgtccaggctggagtgcagtggcgagatcttggctcaccgcaacctccgcttcccgggttcaagcgattctcctgtctcagcctcccgagtagctgggattacaggcatgtgccaccatgcccagctaattttgtatttttagtagagacagggtttctccatgttggtcaggctggtctcgaactcccaacctcaggtgatccacatgcctcggcctcccaaagtgctgggattacaggcataaaccaccacgccaggccctttttttttttttttttttgagacagagtcctgggccgggcgccgtggctcacgcctgtaatcccagcactttgggaggctgaggcaggtggatcacctgaggtcgggggttcgagactagcctgaccaacatggagaaaccccatctctactaaaaaatacaaaattagctgggcatggtggcgcatgcctgtaatcccagctactcggaaggctgaggcaggagaatcgcttgaacccgggaggcggaggttgcggtgagccaagattgcgccactgcactccaccctgagcaacaagagcaaaactccgtctcaaaaaaaaaaaaaaaaaaaagagacagagtcctactctgttgcccagcctggagtgcagtggcacaatccccactcactgcaactctgcctcccgggttcaaacgattctcatgcctcagcctcctaactagttgggattacaggcactcaccaccatgcccggctaatttttgtatttttagtagagacagggtttcaccatgttggccaggctggtcttgaactcctgatctcaagtgatcctcccgcctttggcctcccaaagtgttgggattacaggcgtaagccaccatggccggcccttatcttttttaaagtacatgcatacctatatatataaaatttgtacagacagaaatgcctgttgcttggtggaataggtaacagaggttgccaagcagaagtaggactgcggggaggggcatggaagactgttctgtgcaggtgatgcaggtctgtaccatctggagctgttcatgaggatagctttttgacattgtaaactgtctacagtaagagtgctgccacaggcaggtgagggtggggccctccgacccccgaccagccctgcagctctagcttgtctcagctgtgtgaggcagggccttggacaccagcccacattcactttaccatcttgtgtatcaagtagaagtccttcttgtgggcatagaacgccttcttaaaaagcctcttctctataggggtccagacgtctgaacctatcaaagaacacagccaacagggggaaggccatttgtcctgggaccacagccatggctgaaatgcagaccaccttcccatttatagctgccattactgagtaccaattatgtgccaatctcataaaaaactcaaaaagtctccagaagggagggaccactactagccccacttaacagatgtggcaactgaggcttcagtcgcttgctaaaggcaggtgggggccctggcatcctgtttccagagctgatgggttcaaccactgaacctaagcccatcttccctccccctggccatgatcattccccttccagctgggcagagtccgtaaggaaaccactgggaaagggcgaagcaggatcccactagcagaatgtggcgcccactgagtcatcccgacaaggacaggccctcctgaaaggcaggcaaaggtcccgaggagaactccaggaggcaggggcagagcttgcaacagagctggccgattcataggggtctcagctgggccaaaccagctcagcagcctttccccgtcacctgtgtagcgatagtcagcgagcaggtgtgtccgtggcttgtggggccctcggagcagaagagtctccagggcgacctggaacaagaggagcgacaggctgcccaggaccaggtgggggaagaggaccacaggcatcctcccattcatctgaaaaacacttgcggctgtccctgaagacactgcctgtcccagggctattcaaagttgccctggatgggccaccagcctgtgaactgtctgtgcgtgcatcaaccgtgtcaccaggcacaccactgaatgcagctgaagttattttttcacagcaagcctatcctgacgaaggagactgtgtgtggatttattctggcacaagctccttactccctcagggactggcattttgaggagtatgacccttgcgtagggccccatttttattttcttcatagcactagtcaatagctaacaattgaaaacattttatttttaaagatgaggtctcactatgttgtccaggctgagctccaatttctgggctccttcagcctctgcctcccaagtagccaggaatacaggtgggtaccactgtacccagctagctaacaattttctttgttttttcttttttttgagacagagtcttgctctgtcacccaggctggagtgcagtggcatgatcttggctcactgcagcctccacctccccagttcaagtgattctcctgcctcagcctcccaactagctgggactacaggtatctgccaccactccctgctaattttttttttttttttttttgtatttttagtagagacgggattttaccatgttagccaggctggtctcgaactcacgacctcaggtgatccacccccgccttggcctcccaaagtgctgggattacaggcgtgagccatgcgcctggcctagctaacaatttgactttcctaaaatgtaagccccctgagggcagggattttatctcaatcacaagtgtaagccatcattgcagggtttgcataatttgtggggcccactgcaaaatgaagatgcaggactccttgtttaaaaagtattaagaatttcttttctttttttttcttttttgagacggagtctcactctgttgcccaggctggagtgcagtggtgcgatctcggctcactgcaactgcactccacctcccaggttcaagcaattctcctgcctcagcttcccaagtagctgggattacaggcgcccaccaccatgcctggctaatttttttatttttagtagagatggggttttaccatgttgtccaggctggtctcgaactcctgagctcaggtgatccacccgtctcggcctcccaaagtgctgggattacaggcgtgagccaccgcgcctggccaagaatttcaagacagagacagcagagcattaaaccaagcgtggagcccctcagctggccctggccccagtgcctacagtacaggcaaccagcaggtacccaataaatatgtactgccactctgctgaggacctgctatatgccagacactgcctctcaggttggtgaaaagcaagaccatggcatgactcttagatccttaacacaggcaatgtggctcttcctctcccgctcctcacagttagacttttaatatactttctaacacccagaattgtgagcgggggggggggggggggtccttggagtaggtagaggcatttatgttgcatcagaggtttgtatatataagttttcaattgaaagctaaaactcaaggaattaagtagatgaatgcagggcctgagctgggtctttggggcttcccttctccagtgccccctgagatctcagaggaacccctgcgcttgattgttgccccagacaagtagctatgaattgggcccacgtcttagcattcccctacagtccgtgcacaaggaccactgcaatcccaaagccgctgtggaggaggatgggcggccttcttccagcttccatccgctctgaacccccaagcagacagcacgtcacatgcacctagaaccctgggccccaggaaagcagggagggtccccttgctgttcctcacctgaacgttgccctgagcctcgtgcaggcagtgcagagcgagctccaggttggtgccccctcctggcatcacgctggagcatgccacattgcagagctcggtcactgtttccaagaaggacatgaggaagaggaggcacacaggagtcatcaggtgctagggaggaacctttcccgaaagacagcagagagggggtgccttccccttctctctcctgcatctcagggagggacaaggaggaagagcagaaccctgtccccagcacccactcctgatggcctgaccagccaccatgtgacaaaagaggtaggggagggagagtgcagcagggaagaagcaacgctggccaagagccagctccctcccacgcccaggggacactacttggatctagcggtcaggagttccagacctaggaggaaaaacaccctggaaatggagggggaagaagggcccttaggaatttagccccaaagcctcagccacctctatcctgtgtctctgagctgatcatcatatctccccatggcttccagaccagagaagctacatgctcgtcagttccagccagggatctctcctggagttccgggatctctgcctgaaaccggcttcctatattgatatgtctgaaatgaggccacacacagataagggagacgtacaaacatgactgagatgggaagtgaaatggagacgctctgtatgccctgctcttgggccacagcctgctccatggaaaccctctgctgtctcaggtgcatcaggtacgtgctgttcccgacagatgcacacagacatttcagaaacttctgcagggacacttcctcccttcctctgttttccttcattgccacatttctctctcagggtcaaggcaggggaggtacaagctgacacccggcatgtgtctacgtccacaccacagccatccagccacatccctcaggcatgcttgagtcccactctgtgccatcaccaattctacctggaaccccaaggtccagggcattctgtccccatgtgccacatatatatttctagaaggaataatttggggggattttcatatatatatatatatttgtagaaggaataatattgggggatcttcctacatatatttggaaaaatctaccgcttcacgcctagggagcctatgtgagtaaacctgaaccccaccatgggaagaaggaacccttgggaaaagtgacactagaactcaaggtggggtaaaagcagcttcactggaaaggacccaacttacggctcaatgctgattttggtgtcatccttcaccacacagatgccaaaggacccatccacttgatctagaaagcacagagtgaaaaggctcaagaagacagacagcaggtaaccgacagggtcctctgcctgcctgtgtggacgcagctgaaagcagggtctttaagatcccatgggttggccgggcacagtggttcacgcctgtaatcccagcactttgggaggctgaggtgggaggatcacgaggtcaggagatcaagaccatcctggctaacacacagtgaaaccctgttcctacttaaaatacaaaaaaaagtagccgggcgtggtagtgggtgcctgtagtcccagctgagacagaagaatggcgtgaacccaggaggcggagcttgcggtgagccgagatcgcgccactgcactccagcctgggcgacagagcgagactccatctcaaaaaaaaaaaaaaaaaaaaaaaaaaaaaaaaaaaaatcccatgggaaagggcagcacttcagaaaaggtagaggaaggaactctaacaaattaactcatgacaagtatacgtatatataaaaacagcacactaaagtctctggaaattgtcctaaggtcattcagcacttggagaaatattcattaaaaaaaatcaactaggccgggtggggtggctcacgcctgtaatcccagcactttgggacactgaggtgggcggatcacttgaggtcaggagttcaagaccagcctggccaacatggcaaaaccccatctctactgaaaatacaaaaattggctgggcgtggtggaatgtgcctgtaatcccagctacttgggaggctgaggcaggaatcacttgaacctgggaggcagagtgagccgagactgtgccactgtgctccagcctgggcaacagagtgagattccatctcaaaaaaataaaaaataaaaaataatcaactgaatattggtaagaacaagaggctgttgcatctgagctgtgacctgctcccttacccagccagctcccagctccaagggttctattccaggtaggtgcagcccagacaggggctgcctctcctgtcagctcccatgcttaaagaattaaaggaaggtataatgacaatttctcatcatagacagaatatcattaagaggtagaaattattaaaaagagagaaccaaatgggaattctggggttagaaagtaaaatattggcaagtgaagctgttgaggaaaataataaaataaccaaaatggggctcaataggtttgagttgacaggaagaaaataatctgtaaacttgaagacagatcagtagagactatggaatccgaagaacaaagagaaaaataaagagagcctcagagaaatgtgggataccattaagtacagcagctacatgtaacaggagtaccagatggaaaggagaaagagacagaaagaaatatctaaagaaaaaggcctgatgcagtggctcacgcctgtaatcccagcactttgggaggccgaggcgggcggatcacctgaagtcaggagttcaagaccagcctggctaacataacaaaaccccgtctctactaaaaatacaaaaattagcctggtgtggtggtgtacccctgtaatcccagctactcgggaggctgaagtgggaggctaacttgggagttagaggctgcagtgagccgagatcatgccactgcactccagctggggtgacacagcaagactctgtctcaaaaaaaaacccctccaaaccacccccccaaaacaaaaaaacaaaagttaaaagctacagtaatcaaaacagtgtgatactggcataaggataagtatacagatcaatagaattgaacacccagaaatacacccacacgtttatggtcaattgatttctaacaatgaattgtgctgagtcaattcaatgggaagtcttcaaaaaatgctgctggaagaactgcatatacacatgcaaaaaaatgaatttggacctttacctcatgtaatatataaaagttatcttcaaattgattacagacctaacctaagagtcaaaattacaaagctcttttttttttttttctgttgcccaggctggagtgcagtggtgccatcctggctcactgcaacctccgcctcctgggttcaagcgattctctgtctcagcctcctgagtagctgggattacagtgcctgccaccacacccggctaattcttttgtatttttagtagagacgggatttcaccatgttggccaggctggtcttgagctcctgacctcgtgatccgcctgcctcggcttcccaaagtgctggcattacaggcgtgagccaccgcacctggaccaaaattacaaaactcttacagggaaacaagagtgactctgcatgacttgggtcaggcaaatcttcacatataacaccacaagaacaagtaacaaaagaaaggaaattgggcttcatgaaaattagaaatgtttgtcctgcaaaaggaccactttacacctactaggatggttatacttaaaaagatagacaataacaagtgttgacaagaaggaggagaaatgaaaatgttcatatactgctactggaaatttaaagtggcccagccattttggaaaacaatccggcagtttgtaaacagttaaatatggagttaccatatgacccagcactacactcctagttatctacccaagagagctgagaacataaatccacacaaaaacctgtacataaggctgggtgtggtggctcaggcctctaatcccagcactttggaaggccaatgcaggaggactgtttcaccccagagttgtttttttttttttgagaccaaatttagctctttcgcccaggctaaagtgaaatggcatggtctcggcttactgcaacctccgctgccgagaccagctcggtcggggagaccctaacccagcggcgctagaggaattaaagacacacacagaaatatagaggagtggagtgggaaatcaggggtctcacagctttcagagctaagagccctgaacagagatttacccacatatttattgacagcaagccagtgataagcattgtttctatagattatagatcaattaaaagtattccttacaggaaacaaagggatgggccaaaatatagggatatgtctggctagttatctgcagcaggtgcatgtccttaaggcacagatcgctcatgctattgtttgtggtttaagaacgcctttaagcagttttctgccctgggtcggccaggtgttccttgccctcattccggtaaatccacaaccttccagcgtgggtgtcatggccattatgaacatgtcacagtgctgcagagattttgtttatggccagttttggggccagtttatggccagattttggggggcctgttcccaacactgcaccctcagttcaagcgattctcctgcctcagcctcctgagtggccaggattataggcacccgccaccatgctcgtctaatttttatatttttagtagagacgaggttttgccatgttggccagcctggtcttgaactcctgaccttaggtgatccacccgccccagcctcccaaagtgctaggattacaggcatgagccaccatgcctggcccacctcagagtttgagaccagtctgggcaacatggcaagacccccctccctacataaaaacaattacaaaaaattagccaggcatgggggtgcatgcctgtaggcccagctactctgggccgaagcagaaggatcagttgagcccaggaggttgaagctgcagtgagctgtgatcatacaactgcactccagcctgggtgacaagagtgagaccttgtctcccaaaaaaaccccaaaaatttctatatgaatgtttatggcagcattattcataatagcccaaagtggaaacaacccaaatgtccatcaactgataaataaacaaaatggggcccatctgtacaagggaaaaatgttcggccataaaaaggaattgagcactgatatgcactacaatatgaagggactctgaaaacatgccaagtgaaataaactagacacaaaaggctgcatattgtatgattctacttacatgaaatgtcctgaataggcaaatccaaagagagaaggcagatgagtgggtgcccaggctgggggaagaagggactgtggggatatgggcggagtcactgctaatgagctctggcttcttctggggatgctaagcgtgctctaaaattaagactatgtgatagttgcacggccttgtgaatatcctaaaaatcactgcatactctaaatgggtgatttgcatggtatgtgaagtacagctcaataaatctgttaggaaaattacataggccaggccaggcacagtggctcacacctgtaatcccagcactttgggaggctgaggagggtggatcactggaagtcaggagctcgagaccagcctggccaacatggtgaaatcccatctctactaaaaatacaaaaattagccaggcatgatggcgcacgcctgtagtcccagctacttgggaggctgaggcaggagaactgcttgaacttgggagttggaggtttcagtcagccaagatcacgccactgcactctggcctgggtgatagagtgatactctgtctcaaaaaaaaaaaaaaaaaaaaggaaatgacacagactggacagggtggctcacacatttaatgccagtactttgggaggtcaaggcagcaaaatcacaagtccaggagctcgagaccagcctggacaacatagcaagaccccatctctaagaaaaataaaaaattagccaggtgtggtgatgcgcacctgtagtcccaactatttgggagtctgaggctggaggatctcttgagaccaggagatcgaggctgcagtgagctgtgatcaagccactgcactccagcctgggtgacagagcaagaccctgcctcaaaaaagaaaaagaaaatgacacagaagggcaggcagaagcatggtcaggctaaatggcctctacgttttctttcgggctgtaaaattctatgcactagaaggcacttagatcagtcctggggcacatctgaatagcaaaggaaccctcagactaggtacacccaggcaggagacaatcactgaacccaatgctacaaggtagagtggctgtggtccgcaggcaatccaccctgggatcacagagtgagtgccccagcctcactcaccgagcatggagctgatgagctggtcagggctggcctgagtggacgtggaacagagggtgttgaagtacaccccagagccctcccggatggggctgagcattgggggtggtgtgtagggggagcactggaataagcccttcaggaggcagtccaccaggaacatgggtgaccgcaggcggctctggtggcatcctgcagggccaggctccccagccgtggagggtgggggccgcttcttccgctttctctgctggctgctctccttgctgtctcgctcctccccgtctttctcttgtccctgaagaagtttagaaccacaggtggtcgcctgaagccacctactgcaccactccatctccaggatggaaagagagcaggaaaaggagaccggccagagacaggaaactaggaaatgcacgcccggcaaaggaggctggccacacctgagccagacctgacgtactgagcctggcgatgatccggctgcagccttctcctgcacccactgccccagcagagcccctgactctgtgtaagaatagcctcaatcattaagatgactggcccttaaaaagagagagatccccagagatacagtgtgacggtgaagaaagaaatgctgctccacccaaatgacaagcaccgaaatgacccagccactgactcaggggaccttcaggtccacggactgtgtccccgagtccagcaggagcttcttcagtagggggtcctccagtacaggctgcagagacaagccctacgagactgatcactcgtaactcaccatgctctctctcacttccacaaaatctcctctccgctctgccagccctactcctcctcatcctctaggtctcagatcccatacctcctcctccaggaagccctcccttacctcctcaggctgggtcaggagccccctgggaactctctgggctccctctgctcccagctctgcccactctgggttgtcactgtctggggacaggcctgtctcctccactggactaggagccctgggaggcagggcccaggctattgtggtcacctctgtgtccccagcaccacccagcacagggcctggcacagaggggctcagtgaatgctgaatgactgaattaacatgcaaaccaggttcttctggatcaagattttcttttttttttttttttttttgagacagagtctcactctgttacccaggctagagtgcagtgttgtgatctcagctcactgcaacctctccttcctgggttcaagtgattctcgggcctcagcctcccgagtagctgggtttacaggtgcctgccaccatgcccagctaatttttttgtatttttagtagacacagggtttcaccatgttgcccaggctggtctcgaatacctgagctcaggcaatccacccgcctcagcctcccaaagtgctgggattacaggcatgagccaccacatccagcctggagtcaaagattttctgtggtatctggtttgggtttttcctacggcttcccccagcagctgcgggcagtggcaggaaggaggcaggccgacaagcacccaccatggccatgctccctatgtgtcgggtcactggaaccacggggatcgattgggggaccaccaaaggggctgcagctgtggggtccaagggcttcttggttcctgggggactatgcctgtccccttctggcctcagcacctgtcttagcggcttgcaaaactctgtgccaaacacctaaacacagaagagaagagatggctctttaagagataaggtaggtggggaaaggaagagctgcttcagcaaaaaaagctgtcatagaaaacagcagtgagtctgtggcatggaccaagctggagagctgctgcagcccatggcaatggcctgcccctggagagccacacagcctgactccagcccccgacccagagtgacgtccccatcctgagataagtgacaccaatctcgtttactccccacaggcctgccagaaacccagtaaccaccaagccactggtcgtcccccttcacctgcggttcctgcttccctcgaggtgacggccactggtcgctgtgaaaacacatgtggctgctcagccctttctccgtataaaacatctggctgcagttcttgcagacaaaagtgctcctgggcttcgtccagtctgtgggactgccgttttgctggttactgtgggacatggcaggaaagaagagtgggagattaggactctgtccttgatcactgattttttgttgtttttttttcttttttgtctataactccaatccactgacttttttttttttttggagatggagtctcactctgttgcccagactggagtgcggtggcaccatctcggctcactgtaacctccacctcctgggttcaagtgattttcgtgcctcagcctcccaagtagctaagattacaggtgtgtgccaatatacgtggctaatttttatatttctagtagagacagagtttcaccatgttggccaggctggtctcgaattcctgacctcaaatgatccccctgcctcagcctcctgaagtgctgggattacaggcgtgagccaccgcgtccagcctgactactcttgataaaccctataaaatggaggctgtaccctaatcccattaggactgaaagcatcctccccactcacttgtccagggccggcacaggaaggccagaggactcctgccagggtgcatgcaggatcgggggcttcttaacttaccctctgcctgccacattctcttccttcaccggatgggggagcctgtagatgtttccaccctgaagatgaaaatgcatctgaaccaacacatccaaaatgaagaggcaagaagagctcaaattacagacttttagaagaaaacatcagagtaaatcttcatgaccttggattagacagtggtttcttagataagacaccaaagcaaaacagacaaattagacttcatcaaaatgtaaaacttttagccaggcgtggtggctcatgcctgtgatcccaggactttgggaggccgaggtgggaggattgcttcagcccaggagtttgagaccagcctgggcaacatggcaaaaccccatctctacaaaaaatacaaaaattggcctggcatactggcatgggcctgaggtcccagcgactcaggaggctgaggtgggagaatcacttgagccaggagttcaaggttgcagtgagccatgatcgtacaacttcactccagcctgagtgacagtgagaccctgtctcaaaaaaaaataaaaaataaaaaataaaaacttttgtcctgcaaatggtatcataaataaagtgaaaagacagaccacaaaatgaaagaatatttgcaagtcatgtgtcagataagggtcttgcatccagaatatatagagaactcaaaaaatagtaatctgattttaaaaaataagcaaaggacctgaacagacatttcttctagaaagatacacagatggccaataagaacacagaaaggtgttcaacgtcagcagccacggggaaatacaaatcaaaaccacaatgagatactgcttcacacccgccagggtagttataatttaaacaaaccacggacaataacaagtgttagtgaggacatggagaatgtggagccctcatacactgtgggtgggaagaggaaacaagcaaaacagcctagtagttcctcagacctaaaacagaactgctgtacgacctggcgattctactcctagaacataaatccccataaaaatttgtacatgggtgaatattcacagcagcaccatattcaaaatagccaaaaagtggaaacaacccaaatgtccatccactgatgaacagacaaataaaacgcggccttatccatccaacagaggatcactcagtcatggaaaggaatgcagctctgccgtttgccaccccacggatgagcctggaaaacgtcatgctgagtgaaggaagccagatacgaatgccacagagtgcatgattccactcatatgcaatgtccagaacagacacatccacagagacagaaaggagactcgtggctgccaggccctggggggagggcgagattgtgggtgacaactaagaaatgtggggttccttttggggagatgaaactgttctggcaaagagtggggatggttgcacgatcttgtgaatatactacaaattacccaacgctacactttaaaatggtgtattcaggccaggcaccatgactcatgcctgtaatctcagcactttgggaggccgaggcaagcacatcacctgaggtcaggaaagaccagcctggccaacacagtgacaccctggctctactaaaaatacaaaaattagctgggcatggtgatgtgtgcctgtaatcccagctacttggaaggcccaggcaggagaattgcttgaacttgggaggcagaggctgcagtaagccaagattgcaccactatactccagcctgggcaacagagtgagagactccgtctcaaaaataaatttggccaggcacagtggctcacacctgcaatctcagcactttgggaggctgaggcgggtggatcacgaggtcaggagttcaagaccagcctggccaagatggtgaaacctcgtctctactaaacacacaaaaattagccagatgtggtggcgcatgcctgtaatcccagctactcggaggctgaggcagagaactgcttgaacccaggaggcggaggttgcaatgagctgagatagcaccactgcattccagcctgggcgacagagtgagactccatcataaataaataaataaaataaatttaaaaaataaaataaagtggtggatttggctgggcatggtggctcatgcctgtaatcccaacactttaggaggccgagatgagaggattgcttgagcccaggggttcaagaccaggctgggcaacatagcgagaccccctccatctctaaaaaatatataaaaaataaaatggtgcattatttggcacctgaataataaagatgttaacaaaacaaaaatgaggtagctgtggtatgatgggaagctactcatcctcctgagtagctgggaccacaggcgtgcaccaccatgcccaactaattttttttaaattttggtagagacagggtttcgccatgttgcccaggttggacatggagtcaggagacctggatgagctctttggaccaggccctccaaacacaacatctggaggaaccagtgaataattatcaatgtgcttaagtgtggggcacgatgcaggtgcccacttgtgcttgtggaaaccaagactcacaatcagaaaacacatggccatttcaagcaggaatctttaaaggaaagagagcatctaccttcatatcctctgaagattctaaaaaggcaaatccaaagggaaacaagagaaaaaaaaaagcaaaaaaggctttgtgagataacagtgttttgaacaactctgggatatcctcatgttgatctttttttttttttttaagacagggtcttgctctgttgcccaggctggagtgcagagacacaatctcagctcactgaaacctccatcttccaggttcaagcgattctcccccacctcagcctctcgagtagctgggaccacaggcgtgtgccaccacgcccagctacttttttaaaattttggtagagactgggtttcgccatgttgcctaggctgatctcgaactcctgagctcaagcagtctccccacttcagcctcccatcccaaagggctgggattacaggcataagccacctcacctggcctcattctggtctttttttttttagtggggaaaaccacaatctttcggaaccttaattccttcctctgtaaaattgcatctggggactctctgaaatgaaataaaatgcctggacaactaacaaatgcaaaggaaactcactccactctggtcaggccacgtgagagagagctggtacctggattctgctgaatattgtcagcttggacttggagggatctgccgggggcccggccgatgagaaggaggccatggctacctggctcggagaagccgcacagcacatatccatcttcgccttctctttccggaagccggagaatcgcggggccctggggttgcccaagagccggtagcctccaccccgggagcaggctgggcccttttcaccttttgtgatccttgaagccgcgccattctcggctggggcctgcttccctggcagcgaggctcctggtggctcctccccacctaactgggtctgccgttggcctgtggaggggaagatgtcctccaggtccaaggtccctttagaggatcgcagctgcttggccagagaagagatgtctggattcctggaagggtccagagacggtgctgcaaggggcgttggaaccgcggccactttcagtcccccctttgcgtctcgtctcgtgctgccgggggaggcctctctgggaaccccgggtgtggtttttctcctgcgggctggggagccctctgcctcggggtttccagggccggcgtggagagagtccacagcaggagccagtggtgggggctgctgcggccacggcccctgcagcggcctcagggcggctggtttgccctcgggcgcagggagctgggaggagactgctgccacctgggcatgggagaagatccgctgggacttggtgatcatctggaacacctgcatctgctcgtggctcacaagaggttcctgcgacttgaggaagagctggcggaagagcggcgaggcatccgcagggagcccgcctgccttctgggcctcctggaggccgggctccccggggttctggcacaggaaggagtcgcagtcgaccttgaccttcttgggggcgcaggggtcatcttccccgctggccgacctggggtcgctcggggcctccgcggggaccctgaggagcgcggcagggaagggcagagcatcctccaggccaccgccggggccgggcggggactcctccgaggggcttccgctgctgggtcccgggccagactcggagccctcccgcgagggcacggccgagggcttgtggacaacaaacacgttgttgcctttgcttttgggacagcccggcaggttccggagccactggaagctgtggctcgatggctgggaactggcagggaccgtctggcctcggaagagaggcaggcaggcaggcacggagccgccttcgggccagcactccgcggtggaccgggcctggagcagcgcggtatctggctccggctctggcgggtcgggggcgccgttctcggcggccctggaattaggggctgtgaacacgtcagtggccggctctttctgtgggaggcaaggctcctcgggaagctcggtgtccagcgctgctggggccgcgtgggggccggctggggtgcaggacgaggaccccgatgaggcggggcagggacaggcagtgttcctcccttcgctgtctgaagcccccgccggggctgggccaggagaaggggtcttctggtggacgatgctactcacgatgcggcgcaggaggtcccggtggggcaggagggagccgggggacctggcctctgggggcaccagggaccgcaggctgctggggggcggctggccggccgactcgtgggcgtggggggagtccccgcaggcctcttcctccgggggggcttccttcaggatgcacaggccgtgatggacctcgtagtgccggcgcagagagcggtagtcgcagtagctcttgctgcagccctgctcgatgcacacgaagggctttgtcttctggtgggtgagcatgtgcccggtcctggagccagacacaagcaggggcgtcaccggggcacctgggaccgggctttctgctgtaggaccctggtggcccccaaaagtctgtggtacagttgcaccacaattcagaaattgtactcagcccccacgaggaaagaccacccagcaaaccctgcttcggtcaaagccatctggcaggggagttcctctcccctcacctttaagcaaaccccttacagaaaagtaaaaaaaaaaaaaaaaaccagcggggcacagtggctcatgcctgtaatcccagcactttgggaggccgaggtgagtggatcacttgaggtcaggagtttgagaccagcctggccaacatggtaaaacccgtctctactaaaaatacaaaaaatttagctgggtgtagtggcacatgccagtaatcccagctactggggaagctgaggcaagagaatcacttgtacccaggagatgaagtgcattgcagtgagccgagatcacaccactgcactccagcctgggtgacagagtgagactctatctcaataaacaaacaaacaaataaataaaattttaaaaaatacaaaaaaaaaaatccactgaggccagatcagatttccccagagtgggttcccaaggaacacaaagacctccagagttgctcctcaaggactttggcacagctaataaataagttttgaaaaaacaccattcactccttggaggttcacgatgcacagtagcaaatttaattaattaattttttgtttttgagacggagtcttgctctgtcacccaggctggagtgcaatggcacgatctcggctcactgcaactctgccccccaggttcaagcgattcttgtgcctcagcctccaagtagctgggactacaggtgcgtgccaccacgcccagctaatttttgtatttttagtagagacggggttttgccttgttggccaagctggtctcgaactcctgaccctcaagtgatctgcctgccttggcctcccaaagtgctgagattacaggcgtgagccactgtagccggcacacagtagcaaatgtaaaagccacacagagagagacctgtttaactttcagtgtctctcaaacttatttgcccagagaactgtttttggttttgttttcaaaaagcccctattagcattcctgagaaccagaattctgcagaatagactggaggagatgctaacttggggacgatccttcctttaacaaaggaatctgtgccttaccgtaggagacccctaagaagatgctacctggaaccccccacagcaaagaagccaatttacagaggcccaatccatagaaacattatagagccaaacagccaaatgtgcctatagtttctgcaaacagaaatgcatgtaaatatgtattgcatcacacctacctctgcattaacacattataaatataagcagaggagtacatcaccctctgggcccccaacagccctgctctggacagtcctagtcgatgtggactaaatcataaagtctttccccaaaggctcaccctcagcctctgtctgagggaagcaacagagagggaatcaggagacctaagttctacccccagctattaccaacttgtgacatgagcaaattggctccttttcctggggtaggtgtgggtgagaggataagatgaaagatggattagtcaaagccccttgtgaaagggaggagccccataagaatgctaagtactttcatctcccacttgcaggtctcctggtttgaaaaacatgtgtctttctttcccccacaggcaagacaagcttatcatttccaagacattaagcggtggctcacacctgtaatcccagcactttggggaggccgagtcacgcagatcacttgagaaatcctgtctctactaaaaatacaaaaattagccaggcatgatagtgcatgcctgtagtcctagctactcaagatgaggaggcaggaaaatcacttgaacccaggaggcagaggcttgcagtgagctgagatcacacctctgcactccagcctgagtgacagagcaagactgtccaaaaaaaaaaaaaaaggaaattttgctcctgacactttttaagtcaaaagttaaaaggaaaagaatgagttttttaaaaaagaaaaaaaaacaaaaaaaaaaatagaaaagaaaaacaaagctggggccgggtgcggtggctcacgcttgtaatcccagcactttgggaggctgaggcaggtggatcacaaggtcaggagtttgagaccagcctggccaatatggtgaaaccccatctctactaaaaatacaaaaattagctgggcggggtggcatgcgcctgtagtcccagctgctctggaggctgaggcaggagaatcgcttgaacctgggaggtgaaggttgtagtgagccgagatcgtgccactgcactccagcctgggtgacagagcaagactccatctcaaaaaaaaaaaaaaaaaaagaaaaaaaaagaaaaacaagggttaattctccattgccatgttctagaagcaggcgtctcatctttcctgtctcgtgctatcccaaaacacagagaacacagatccgttttcctcagacacctaccagagactcaggacatagctctataaagttagcccaactcctcccatgacacaattgactcagaagccagctgttaggcgtttttaacccacaagcagcccatctgcaaacagaagcaggggcttcctcacaggcgtgaatttaggggctgggacagcagcgcccactctcttccctgcgctctgatggtgtgagaagaacggagtgggctgggcacggtggctcacacctgtaatcccagaactttgggaggccaaggcgggaggatcacttgaggtcaggagttcaagatcagcctggccaacatggtgaaaccctgtctctactaaaaataatacaaaaattagctgggtgtggtggcgggcgcttgtaatcctagctactcaggaggctgaggcaggagaatcacttgaacccgggaggcggaggttgcagtgagccgagatcatgccactacactccagcccggatgacagacaaaaaaaaaaaaaaagcatggagtggctgtggctgcggctgagcagaggtaatacacgtctggaaaacccaacagaggacgagacagcaggttgatctgggagaataggaagaagacccaggaacatgtccccacccccagcccctgaacagacgtttttctgaccagactcccacatacaggtggtcctggcgcttaaaggccttgctgcagattttgcagacgtgcttcctttcctggctgtgtgtcaggtagtgcttgctcagagaactggcgctgctgaacaccttcccgcacaggctgcagtccagaagtgggttttgaggggaactgtgctgccgctttcctttcctggcactccccgaggtggcccttcctccttcgtcagcctctttagccttaagcacacctagccccaggtctaaacagagggagaaagcacaggttatacacagccaaggcaaccaagcgaaaagcacgactaaggcactctacacctcttagaaccatggtggccttgtaagtgttgcgcgagaactcttgctccacacaaagtaaacaaggttcaggagcaggtgaggggaacagaagccctgcaggatggcacccggacttggtgccacgtgtggagggatgactgcagactgaagcccttccagagcagcatgaccacaatgggctgggctttatgaccacaccatcacctggtactcttggaacggcaattagaaatatattatccaaaaccttggaaaagtagaaatccttgcacacacccagccaattctgtttttggggttttcacataaggaaataaatgtagctttgtacaaagatctagctgcaagggagtaaactgtcatactgcttttcctggtgaaatgttataaacaacctaatatctgggttgggtgtggtagctcacacctgtaatcccagcactttgggaggctgaagcaggcggatcatttgaggtcaggagttcaggacgagcctggccaacatggtgaaaccccgtctctaccaaaaatacaaaaattagctgggcatggtggtgtgtgtctgtaatcccggctatttgggaggctgaggcacgagaactgcttgaacccaggaggcggaagctgcagtaagctgagatagcaccactgcactctagcctgggcgacagagtgggactctgtcaaagaaaaagaaaaagaaagaaagaaagacaggaaggaaggaaggaggaaggaaggaaggaaagagagagagaaagagagagagagaaagagaaagaaaggaaggaaggaaggaaagaaggaaagagaaagagaaagataaggagagaagcaaagaaagaaaggaaagaaaaagaaaaagaaaggaaaagaaagaaagaaaagaaagaaagaatcagatggactagtaggattattagctggttttattttcctctttttgtataggtaaattgtttatattttatgtatcccttggataaaatgataaaatatatagttatgaatcacatcacccaagaaatagttaaaggaactgggaatattcagtttggagaggtcagacgtcttcaaatatctgaagggccagtgtatacaggagacagcagactgcttctgtcttgctctaagtacagtggtgcgatcacagctcattgcagtctctaagtcctgggctcaagtgatcctcccacctcagcctactgagtagctgggactacacgggccaccaccactcccagctgatttttaaattgttatttgttgtagagctaggcttggtgaatgaaaattaaagggaagctgacctcacaccactggaaacatagggtttggccttgctcactgctgtgttctcagatgcgagagttcccattctggcactcacaggcactcaataactgtatgttagatgaaggaataataaaagatttttctactttttagattgacctgaaaggtggattagactgtctttttttttttaattttttttttttttgagactgagtcttactctgttgcccaggctagagggcagtggcgcaatctcggctcactgcaacctctgcctcccaggttcaagcctcagcctctgcagtagctgggactacaggtacctgccaccatgtccaactaacttttgtatttttagtagagatggggtttcaccatgttggccaggctggtctcgaacttctggcctcaggtgatccacccacctcagcctcccaaagtgctgggattacaggtgtgagccaccgcgcccagcctgcctttttaacttcttatttcttattattttcttgatagagatggggtctcactatgttgtccaggctagagtgcaggggttattcacagacgcaatcatagctcaccgcagccttgaactcctgggcgtgagcagtccttctgactcagcctcccaagcaggtgagactacacgtgcacaccaccatgcccagctaatttttatttttatttcttgagacagggtcttattctgtcacccaggctacagtacagtggtgcgatcacagctcattgcagtctctaagtcctggtctcaagtgatcctcccacctcagcctattgagtagcacgggccaccaccaccccagctgatttttaaattgttatttgttgtagagatggggtctcactatgttgcccaggttagtctcaatctcctggactcaagcaatcctcctgacttggcctcccaaagtgctgggattacaggcgtgaaccatacatagcacctggcttaaactgccttatgagatggcaagtttgtttgtttgttgagatggagtctcactcagtcacccacgctggagtgcaatggcgccatcttggctcactgcaacctctgcctcctgggttcaagtgattctcctgcgtcagcctcctgagtggctgagattagaggcgcctgccaccatgccaggctaattcttatatttttagtagagacggggttttgccatgttggccaggctagtctcaaacttctggcctcaagcgatcctcccacctcagcctcccaaagtgctgggattacaaagtgcatgagccactgtgcccagccaagatggcaagtttggaaataataatttatcagggatactatggagatgggatccaagaattcaatgggccagggcatgggaagagcaggaggttgctctaaaggatccaatcgtgcaaattctctgtggctcatgagatgcagtgtgacagacacagcagaagggaaactgggctgggagtcttgaggcctagactctcctcccaatcctgcctgtggccatttgtcatggaacttgcttggcctttgtctttgtcctctgagaaattactataatgagtagtcaaataactccaacagtttcaacaaggaaaaaccgggctccctcaggcaaaagtccttagccttactcagtcacttaaaaatgcctattaaaatcgagaccatcctggctaacatggtgaaaccccgtctctactaaaaatacaaaaaattagctgggggcagtggcgggcgcctgtggtcccagctactagggaggctgaggcaggagaatggcatgaacccgggaggcggagcttgcagtgagccgagatcgcaccactgcactctagcctgggcgatagagcgagactccatctcaaaaaaaaaaaaaaaaaaaaaaaaaaaaagcctattaaagcaactataaaactagaaaacaaaacgtttttaaaaattggcaaggaggccgggcacggtggcttatgcctgtaatcccagcactttgggaggccgaggagggtggatcatgaggtcaggagtttgagaccagtctggccaagatggtgaaaccccgtctctactaaaaatacaaaaattagctgggcgtggtgggggacacctgtaatcccagctactcgggaggctgaggcaggagaatcgcctgaacccgggaggtggaggttgcagtgagccaagattgcaccattacactctaacctggtgacagagaaagactccgtctcaaaaaaataaataaataaataaaaattggcaaggacactgaaaaacaggcaaacagaggaactagcctgggaagtcacttgatcttcttagaaaccagtgttataagggctctacagttttttaacatttatttatttatttatttgttgagatggagtctcactctgttgcccagcctggagtgcagtagcatgatctcagctcactgtaacctccatctcccagattcaagcagttctcctgcctcagcctcccgagtagctgggattacaggcacccaccaccatgccaggctaattctttttttttttttttttttgagacggagtcttgctctgttgccaggctggagtgctgtggtgcaatctcggctcactgcaacctccgactccctggttcaagcgattttcctgcctcagcctcccaagtagctgggattacaggcacgtaccaccacacccagataatttttgtatttttagtagacagatttcactatgttagccaggatggtcttgaactcctgacctcatgatccgcctgcctcggcctcccaaagtgctgggattacaggcgtgagccaccacgcctggccaaattattgtatttttagtagagatggggtttcgccatgttggctgggctggagtggaactccttatctcaagcgatccgcccacctcagcctcccaaagtactaggattataggcatgagccaccatgtccggccagagctataaaattgtttaatgctccgtctgggtaaactgactttgaggaaaatattcaaagaactaatccaaaagaaaactcaacatgtacaaagttgttcacagaaacactttaacagtccaaacagcaagaatatggtctaacagtccaatggaatagctatttcagtgaccctcagtatgaaggtctaccttcaatatgaaagcaaatacaccaactcttacaacttaaatggaattatatacttaatattatctctgcaagactatgtatgtctgactttacccacgtttaaaaatttacaagtgaggtcaggtgtggtggttcacacctgtaatcccaagcactttggaaggccaaggtaggcagattgcttgagctcagttcgagaccagactgggaaacatagtgaaaccccttcactactaaaaatacaaaagttagctgggtgtggtggcacacacttgtaatcccagctactcaggaggctgaggcgggagaatcacttgaacctgggaggcagaggttgcaatgagccgagattgtgccactgcactccagcctgggcgacagagcgagactccgtctcaaaaaaaaagaaaacaaaacaaacaaaaaaaccacgaatatctcgccagtgctttaaggtctatgaagtgtgtttacaatagttccttcttttgttttactctggggggaagcagagaggatattattgtccacctgctttatggataaagacactggggtctaagaaggcctgacaaccaaagatcagaagggaccggaccccagttcattctggaaatgtgacatcagcctctaaggtgtggtaatgggaaggaaagtcttcagtaaatgctaacatctgcccacacaccacacaaaagataaggatatccccagacacctaagtttctgaacattattccctagaatgagtgttctgtttcctttactaagaattgggggccgagtgtggtggctcacgcctgcaatcccaccactttgggaggcggaggtgggaggatcacttgaggtcaggagttcgagaccagcctggccaatatgatgaaaccccatctctactaaaaatacaaaaattagccgggcatggtggcaggcgcctgtaatcccagctactggggaggctgaggcaggagaattgcttgaacccggaagccagaggttgcagtgagccaagaatgcaccactgtactctgcctaaaaaaaaaaaaaaagaattggccgggtgcggtggctcatgcctgtaatcccagcactttgggaggctgaggcgggcggatcatgaggtcaggagatcaagaccatcctggctaatgcagtgaaactccgtttctactaaaaatacaaaaaaattagccgggcgtggtggcgggcgcctgtagtcccagctactccggaggctgaggcaggagaatggtgtgaacccaggaggcggagcttgcagtgagctgagatcgcgccactgcactccagcctgggcaacagagcaagactccatctcaaaaaaaaaaaaaaaaagaattggggaatgattcccaagtaggaaaaaaggtgactgttccctaagtcacctgtaggagggaaaaattttcttaaccaatccatgcagaatcagtccctagctggccacagaaactgtcgaacatcctgcagggcccttctacccaggtgacagcctcaccttgtaaggatgcctgagactccgaatctgcgtactcctccagcagcttcacagaatcactgtccttcccggagtacagggacaaggtgtctaagttgtcctccagcacctcgctggacatgtcaggcgttgggaggctggggtccgggtccagaccactcaggccagcataaagaaagcctcgcgtgttgggacccaaatcccggttgagggtgtcgctgcagttgagcccttggctctctgaaaatgaagggaggtgcatttctgatgggagggcaccctcgtctccaaggctgtactggtccatggctctccactgccaggtcttggccaaaagctactctccagataagcaaaaccatgtaaggagacagggaggagagagcccttgatggcaactaattcctgaaaatgaagcaagaagaatgaaagttattaggtggcaaaacagcattgtgggcagagcacggacttgcaatgcaagcagacctcgatctgggtctgttctctgcctcataacagccatgtggctttgggcaagtcacttaagctccacgagccccaggtgcctcatctgtaaactgggcataagagtacttccttcacaaggttgttgtaacaaataaaagtacttccagcaacatggtggactgaactgacctcttgctccagctataaacatatacatgtatgacaaaagataattttttaacacatagcctaggtcaaaagacaggaaaaatcccaagtgccagcagcaacaagaaaactcaatgctggaggtgtaagctcacgtaggccccaggggaaaatcagaatcagatacagggcctagagccatttgtccaatatggtggccactagctccatgtggctatgaagtacttgattttttcttttaattttttacagatatcaaatcgaaaatggataattttttttaagatatggggtctcaccatgttgcccaggctggtctcgaactcctgggctcaagcgatcctcccaccttggcttcccaaagtgctgggattacaggtgtgaaccagcgcacatggccctgtgaagcacttgaaatgtggctggcttgaactgagacaggctgtgagtgtaaaatacaacctggatttggaaaactttgtacccaaaaaagtcaatttaatacgtttctatatagattaaatgtggaatgataattttttttcttttcctttttttttttttttgagatggagtctcattctgtcgcccaggctggagtgcagtggcgggatctcggctcactgcaacctctgcctcccaggttcaagtgattctactgcctgagcatcccaagtagctgggactacaggtgcacgccaccacacctggctaatttttgtatttttagtagagatagggtttcaccatgtttcccaggctgatctcgaactcctgacctcagatgatccacctgccttggcctcccaaagtgctgggattacaggcgtgagccactgagtccagcctggaatggtaatattttccatataatgggctaaatgcaacatgttattaaaattaacttcatctgcttatctttttaatgtggctcctaggaaatttagattatatatggctcgtattctgtattatcaaatgctgccctgccgtctgggacctgggatgatagcagacacgtgggtgagggaaacagggccttgagttcccaggaaacggaggcctggggccctggaagagctgaaccatccacaggaaaactaaataaatgaaaagaaaagcttcacacaagcctagaaaagtacccccaagaaccagaaaaaaatagccagtgagagatgacaaagctgagcattctacaagtctacaaaagaatgacaattaccctgatggcaaacttctcaacagaaacaagcctcgaagataagaataagaatatcatcagtggactaaggaaaagtcagccagcacagagctcaacatacaggcatgagagagggagggaggaggctgggcgccagggctcacatctgtaaccccaacactttgggaggcagaggagggaggattgcttgaggccaagagtttgagaccagcctgggcaagacagcaagactggcttctacaaaaaattaaaatatcagccaggtgtggtggcgtctatctgtagtcccagctattcagaaggctgaggcaggaggatcacttcagcctgggagcttatagacttttacacacaaggcctaagaatctaccttacagaccctggtccaaaaaatgactaaaagttttgaatcaattgggaaaaaaaaaaaagagatgatggtaacttcatacttttaagcttgcacactaaaagaatctaagtataaccaccaagagaagaaaaataaaccacataacatctaaactagtagaatttattccccccaaaatgggcagggggagtggggcagcagagtttactttaaaatactgtagggaaaagagagaaaagactcatagtactgcaactaggaattaaagaggaaacacatcactaatggccttagaaaaaataagaaggattataaaagaatactacaggccaggcgtggtggcttacgcctgtaatcccagcactttgggagaccgaggtgggcggatcatgaggtcaggagatcgagaccatcccggctaacacggtgaaaccccatctctattaaaaatacaaaaaattagccgggcatggtggtgggcgcctgtagtcccagctactcgggaggctgaggcaggagaatggtatgaacccaggaggcggagcttgcagtgagccgagatcgtgccactgcactccagcctgggcaacagagcgagactccatctcaaaaaataaataaataaataaatagaaataaaataatactataaacaactgtattcagataattaaaaaattagataacttagatacattaacttagttatttaaattagataacagattaaaatgggcaaactgctagaaagatacaaattaccaaaacttactcaagaagaaacagaatttcttttttttttttgagatggagtttcgctctgtcgcccaggctggagtacagtggcgcaatctcagctcactgcatcctccgcctcccgggtttaagcaattctctgtctcagccggattacaggtgcccaccaccacgcccagctaatttttttttttttttcctgagacagtttcactctgttgcccaggctagagtgcagtggcgccatctccgctcactgcaagctccacctcccaggttcacgccattctcctgcctcagcctcccgagtagctgggactacaggtgcccgcccccgcgcccggctaactttttgtatttttagtacagacggggtttcaccatcttggcgaggctggtcttgaacttctgacctcgtgatccacccgcctcggcctcccaaagtgctgggattacaggcgtgacccaccgcgcccagccaagaaacagaatttctgaatagacctatgagaaataaaaagactgggccaggcacagtggctcacgcctgtaatcccagcactctgggaggccgaggtgggcaaatcactggaggtcaggagtttgggaccagcctgacaaacatggtgaaaccccatctctactaaaaatacaaaaacttagctgggcatgatggtaggcacctgtaatctcagctactcaggaggctgaggcacaagaatcacttgaacccgggaagcagaggttgcagtgagctgagatcgtgccactgcactccagcctgggcaacagagtgaaactctatctcaaaaaaaagaaagaaagaaaagaaagaaagaaggaaggaaggaaggaaagaaagacagactcaactagtaattttaaagctccctgtacatcttgccatagaaacaccaaaaacaaaaaatcaactttaacaaaactctgggaagcagtcaaagctttatagcaaccaagcaaaccctaagaaaaaggtgactttgatgtttgattacaggctcacgcctgtaatcgcagcactttaggaggccgagatgggcagatcacctgaggccaggagtttgagaccagcctggccagcatagtaaaaccccatctctactgaaaatataaaagttagctgggtgtggtagtgcacgcctgtagtcccagctacttgcgaggctgaggcaggaggatcgctcgaacccaggaagcggaggttgtagtgagccgagattgtgcctctgcactccagcctgggtgacagagcaagactctgtctcaaaaaaaaaaaaaaaaaaatggtgactgaaacccagtgggagaactttgtggcatatttaacttacccctgccccatccctactccctggctcagcagtggtctcgaaggtagcagcccatgtttctggtgtgggttccctggtgctggagggaacagagaggatctggttttcaaagaacagtggttgtctgtctgacctgtcagtggctccctgaaagcccaatgcaaagatcttgcctttttttgtacctaactggcagctctctggggtgcagagtggctacagacagggcgtttgttgcaaacattaaagtcaaatgaactagatgctgcaggctggcgcaaaagatattgattggggcaaacaactgacttgctaaaagccagggaggaaaagctgggaagttggatactttggagaaataaaggctttgaaaaaatgagccaggcatggtggctcatgcttgttatgccagcattttgggaggccgaggcaggtgaatcacctgacatcaggagtttgagaccagcctggccaacacggtgaaactccgtttccactaaaaacacaaaaattagctgggcatggtggcaggtgcctgtaatcccagctgcttgggaggctgaggcaggagaatcacttgaatgtgggaggtggaggttgcaatgagccaagattgcgccactgcactccagcctaggagacaagggcaaaactctgtcccaaaaaaaaaaaaaaaaaaaagtccacactggcagtttcttataaagctacacatagtttttttctgcatctatttgatgattgtaatatatatatgtataaaatcttatcatgcaatccagcaactacactcttaggcatccatccaactgagctgaaaacttcagtccacacaaaagcctgcacacacatgtttatagcagctttgttcataactgcccaaaactggaagcaatcaagacatccctcaataggtgaatggatcaacaaactgtggaacatccagacaatggaatgttcttcaggaataaaaagcaataagctatcaaaccacacaatgacatggaggaaccttaaatgcacattgctaagtgaaggaagccagtatgaaaagattacataccgaaaaaaaagaaagacaagactacatactgtgagactccaactatatcacattctggaaaaggcaaaactatagagacaataaaaagaccagcagttgtgtggtttgtggggtgaggagtgaaactattttgcatgataatctaatgctgcatacctgacattataccatagtcaaaacccacagaactatacaacacagagactgagctctggctgggtgtggtggctcacacctgtaatcccagcactttggcccaggagtttgacaaagtcagaccctgtctctatgaaaaaaaatttttttttaattagctgggcatggtggcacatgcttgtggtttcagctacttgggaggctgaggagggtgaatcgcttgagcccaagaattggaggcttcattgagctatgattgcgccactgcactccagcctgggcaacaaagtgataccctgtctcaaaataattaattaattaagtattaaaaaaattaaaaaatccaaatgaataaaaaaagagcttccacatattcctgggaatttagaaggtggcatctcagggtgggcacatgtttggaaaggaccagagaaggcttccaagctctcacctctggctgaccttcgctctgtgcaggcagagagtgaaggcgaaggtagggttgttaaccgcctgcctgagtgtggaagcagtgccccgctgcaactactgggagctttttgttttttgttttctgttttgttttttttttagctccaggagtttaagaagatctctgttaagtcactagctgaccactaaactaacagaacagactactgaccacaccccacaaagaacacaatctttacaaaaatagcttagaaaagccactaaacaaacagttacaacccacaataagcagaaacaaccaagcctgaggacagggaagaaaggaagaatcccattcccagagttaccagactgcaatatgcaaaatatccagtttacaggctgggtgcagtggctcacgcctgtaatcccagcattttgggaggccgaggcgggtggatcacctgaggtcaggagttcaagactggcctggccaacatggcgaacccccgtccctactaaaaatataaaaattagctggctgtggtggcaggcacctgcaatcccagctacacgggaggctgaggcaggagaatcgcttgaactcgggaggtggaggctgcagtgagccaagatcgtgccactgcactccagcctgggcgacagagactgtctccccaaaaaaaacaaaaacaggccaggcgcgctggctcatgcctgtaacccctgcactttgggaggtccgggagggcggatcacttgaggtcaggagttcaagaccagcctggccaacatggtgaaacgccatctctactaaaaatacaaaaattagctgggcgtggtggtgtgtgcctgtaatgccagctactcaggaagctgaggcaggagaatcgcttgaacccgggagatggagtctgcagtgagttgagattgtgccactgcactccagcctgggtgacagactgagactccatttcaaaaaaaactaaaaacaaaaaacaaaacaaaaaaaaccaaacagataaaatgtccagttttcgaatcatggaagcttgagaaaaatgagagatcgagtttttcagcaaaaaattatgagtcatgaaaacaaaaaagcatagccccttcagatggccatctgtctcacacaaatggaatcagatgacctgtggccttctgtgtctggcttctttcactaagcacagtgttttcaaggttcacccccattgcagcacgtgtcactgctccatttctttccagggctaaataatgttcccctgtctggagagaccacattttgtttaaccactctcctgttgatgaacatttgggttacttccatttgggggctattgtgaataattctgctcacacctagatgttaaagaaatgcttcatgactcactgaataacaaatctagtgcatacttgaataacgggagtttgggactagatttctaggccaccagtttctactttctaagaacttttcatgttgatatgtaatagaacctctgcacctgcaatgtctgcattgcatgttatatgtctacctgcctgtctgcgtgtatgcagcctattgaggcagcacaaatttaaagtcacatacaggtacgtaatcccatatacaactctgagacccaactgagtttcagaatttgagggggttttagaagtgtaaatcaatgcataccccgtattttaagtaacttccagtggggttcaaggcagtacctggtaaccaaataattatttctgcatcattgcctatgaccactcagcgtacgtgaaataaaggctgtgaaaagcaacatgtagggtcaggtttggccaccagatgatattcgagatgcctcaggattctcagagctttttgggtttccaaaaaatcagggagaggagtgtggatctgtaagccaaattcaaatttcaccagttccacagtgtctgctacagtgctgctataaactgttttcaccactctatgaggggaaaaacccatctccccctgcatctcccaataataaaaacaagtgaataaaaatcacatatatattttttgagacgaagtcttgctgtgtcccctaggctagagtgcagtggtgcaatctcggctcactgcaacctctgcctcctgggttcaagcaattctcttgtctcagcctcccagtacctgggattacaggcactcaccaccacgcctggcaaatttttgtacttttagtagagatagggtttcaccacgctggtcaggctggtctcaaactcctgacctcaggtgatccacccgcctcggcctcccaaagtgctgggattacaggcataagcccccgcgcctggcctaaaaatcgtatttattaagcactttctccacatcgggtatcataccaagtgctttatatgcattaacttacttctcacaaaaacctagattgtagtattacttcccttttacaaataagagagactaatttgtccaaagtcaaaacccaacagccagatcttaaacccagatactctgacattagcgctaatggtcttgcccattacacagtactgattccctataaactgaactgtatactgcactgctccaattaaactacaaaacacataaggtgctgggtcagggggaagaatgtctctggactccccaaggccaaatcacctgctttccaatatactcccatagtccacagaacaaactggtcaggttacaacctcagacaggcaagccaaaagtccaaaggccatgccttgatatttacatccttctccagacagtaaagcaaaaccctctctaccgatactgagcttccttttattctgtcaacaaatacattcaattcaacaagagttttagcaccttctaggtacaaaactctctgctagcccttacgaggcagagtttatggtctcctgcaacccggcagacattcccaaggacccaaatactctttccaagaattttatcattttgtgttttcatttaaatgctcaacatcactaacgatcagggaaatgcaaatcagaaccacaatgggataccaccttactcctgcaagaatggccgtaatcaaaaaataaaaaaataacagatgttggcatggatgcggtgaacaagaaacctttctacactgctggtgggaatgtaaactagtacagccactatagaaaacagtgtggacattccttaaagaacaaaaagtggaactaccatttgatccagcaatctcactcctgggtatctacccagaggaaaagaagtcattataagaaaaagatacttgcacatgcatgtttagagcagcataatttgcaattccaaaaatacggaaccagcccaaatgcccaccatcaatcaaggagtggataaagaaatatatatatgatggaatactactcagccataaaaaggaacgaaataatggcattcacagcaacctggattgaactggagactattattcttctaagtgaagtaactcaggaatggaaaatcaaacatcgtatgttctcactttgtaagtgagagctaagctatgaggattaaaggcataagaatgatacaatggactttggggacttggggggaaagggtgggaggggatgagggataaaagactacaaattgggttcaatgtatactgcttgggtgatgggtacactaaaatcttacaaatcaccactaaagaacttactcatataaccgagtaccacctgttcccccaaaatctatggaaataaaaaactaaaaaaagaaaaaagaaaagaaaaacccagtacatctggatcattagaggactcccttgtaaccgagtactaccatgtggtttcaatgcctgggtgtgtttatgattgcactcatgccaaaaaggactacttaattgcttcaggctaaaaagaagaggatggagggggatttagttcataataatgccttcgggctctactagaggccagctggcatcacggtacaaatggaagttttgctgcagttcaaattgagacaagggatgggagaattgagacctcacagggcctgctaaacccaaaagggcccagagtggcagtcggcaaagtaattgtttcaaggagcaggtaagtttcaggaaatggtatccctctcattaaattaaatcggtttggttgctttgtttatatttaatttgcaaattgattttggctttatagctgcacaggagctatacactttaggaacttatgtcttgttctatcatcactgatgccttaatagttttaaaacaatttaagtcaacattggggatccgaagcaattttaattttttttcttttaaaaaaatgctatcagcccagcgcagtggctcacgtctgtaatcccagcattttgggaagctgaggtgtgcggatcacttgaggtcaggagttcgagaccagactggccaacatggcgaaaccccgtctctactaaaaatacaaaaattagccgcgcatggtggtgggtgcctgtaaccccagctactcaggaggctgaggcccaagaatctcttggacccgggaggcggaggttgcagtgagccaagattgtgccactgcactccagcctgggtgacagagtgagactccatctcaaaaaaaaataaaataaaatttaaaggggccatcattccatgactggtgggggtgaggggaaacaaaggattcttctatgaaatgctacgaccttttgggaaggtaacctaccatgagattctagactgtagaagtaagtccacaatagataaataatatttactatgtgtgttgtttggaggggagggaacaatctgaatgcccatctgatttacaaatatattttatttagtctgcaatatatttaaatatgtttccattagttatccagttaaagaatagatggggccaggtatggtggctcacacctataatcccaccactttggacagctgaggcaggcagatcacctgaggtcaggagttcaagaccagcctgaccaatatagtgaaaccccatctctaccaaaactacaaaaattagctcggcatagtggcactcacctgtagtaccagctactcaggaggctgaggcaggagaattgcttgaacttgggaggcggaggttgcagtgagccaagatcatgccactgcactccatcctggtgacaaagccagactccatctcaaaaataaataaataaataaaataaggccaggtgcggtggctcacacctgtaatcccagcactttgggaggctgaggcgggcggatcacaaggtcaggagattgagaccatcctggctaacatggtgaaaccccgtctttactaaaaatacaaaaaattagccaggcgtggtggcgggtgcctgtagtcccagctactcgggaggctgaggcaggagaatggcatgaacccgggaggcggagcttgcagtgagccaagatcaggccgctgcactccagcctgggccacagagcgagactccatctcaaaaataaataaataaataaataaaataaaataaataatagaaaaatagatggatagagcactagagcatcactatccaaaagcactttctgtgctactaagcctgcactgcccaatactgcagtctttagccacatacacagaaatgcagctaacacccttgaggaactaaactctttattttatttaagtttagttaaatttatttatttatttatttatttagagacagagtctcactgtgtcacccaggctggagtgtagtggtgcaatctcagttcactgcaacctccacctcctgggctcaagtgattctcctgcctcagcctcctgagtagctggggattacaggcgcccgccatcatgcccagctaatttttgtatttttagtagagatggggtttcaccatgttggctaagctgggtctcgaactccttacctcaaatgatccgccctcctcggcttcccaaagcgctgggattacaggcgtgcgccaccgcgcctggccagttaaatttaaacaggtacaagcggctaatggctaccatatcagatggtgcaaatctagggatttctcattcaagttaggctttccaacttctatttaaaaatgtgaaagaaaaaatcagaagatctgccaatgctgagtccacattcctgcaaggcaacaattggttggaggtgagaagcccccaccactccctattctctcagctcactgatttctgtgccctgccaggcctctggaggcatctgagtttatgaccctccaaatgaaaccctccaaactcaggcttaaatgtcacctccactatagagaacacttccaacataacaaagtctgagattaatttctccctcctctgaaccctgacaagcacttgtgtaacaatccacttaacatttactctaaattatctaggaagttaattatctttaaagttctcccattttctccagactctcagctctaggatggctgggactcggccttaggtgtctaaacttctcacagtatcttgcctagcacagaactttgatcacagaaggctctgagcatccttttcattcatgagtgacagaattccattgtgccacctcttttcctctttgaaaagctccaaccactgttctgccaccacaccccccacctcctaagcaccaccttctcccttctctccctgcatccatgttaccagggaaagggtcatcaagtctgagtaacagcaggttcctgggagttgagcagacagacttgcagctttcaccctagctatgcaatttccttcattttattttattttattttttgagacagggtcttactctgtcgcccagactggagtgcagtggcgtgatctcggctcactgaacctccacctcgcggattcaagcgattctcccatctcagccacccgagtagctgggtttacaagcatgtgccaccacacctggctaatttttgtatttttaatagagacagggttttgccatgttggccaggctggcctcgacctcctgccgtcaagcaatccacctgcctcagcctcccaaagtgctggtattacaggtgcaagccactgcacccggcctgcaatttccttccttactttcctactccaattttttttgttttcctgagttgaagtctctctctgtcactcaggctggagtgcaatggcgtggccttggctcattgcaacctccgcctcctgggttcaagtgattttcctcctcaaccttccgagtagctgggactacaggtgcacaccaccacactgggctaatttttgtatttttagtagagacgaggtttcactatgttggccaggctggtctcaaactcctgacctcgtgatccacccacctcggcctctcaaaatgctaggattacaggcgtgagccactgtgcccagcctccactccaaatattattgtaaactatagacccattttgtttggcctacacagtatttttacaaattggattagtcatcaacatttttttttaatggggagatttcaccttcctatatggatttctggtttcttttgaaaatgattagatttgatattccttcacagttaacaacgaggtagatctgagggacaaatggcatctctagaaagggcttatggtctccagttttcccagccctcacttatcttcctgcctggcccttataatattcatcattgtaataataataataataataacagtgaacatttattgaggctttatgacatgccaggtactcttgtaatcacttgtatgtcatcgtatttaattcccacaatacttgaggcatatactgtattattaaccctatttcaccaatgaggtaaatagtccagagaagttgagtaacttgcccaaaaccaagctaggattcaaccctgggtagtctaatttcgaaacccttacgcttgcccgctccactatgcttttatcacacacttgagactgggactcctgcttcacactcgtgcctacattcttaagtagaacaatcaagaaagacttccagctgggcaaggtcattctcgcctgtaatcccagcactttctgaggcctaggtaggaagattgcttgagtccaggagttcaagaccagcccgggcaacaaagtgagatccccgccgccccccacccatctctacaaaaaaaatcaaaaattagccaggtgtggtggtgcacacctgtggtcccagctactcgggagactgaagcagaaggattgcttgatgttgggaggtcgaggctccagtgagccaggatcacaccacggcactccagcctgggcaaacagcgaaaccctgtctcaagaaaagaaaggagaaaagaaaagagcaaaacaaagcacaaagactccctcctatagtcttatagttatgtaaccaataactaattttaaccagaaggtaaagtcattttctctggccgggcacggtggctcacgactctaattccagcactttgggaggctgaggcgggcagatcacaaggtcaggagatcgagaccatcctggctaacacggtgaaatcctgtctgtactaaaaatacaaaaaattagccaggagtggtagcgggtgcctgttgtcccagctactcgggaggctgaggcaggagaatggtgtgaacccaggaggtagagcttgcagcaagccgagatcactccactgcactccagcctgggcgacagagcgagactccatctccaaaaaaaaaaaagtccattttggctgggcgtggtggttcatgcctgtaatcccagcactttgggaggctgacgcaggcagatcactggaggccaggagtttgagaccgccttgccaacatggtgaaaacccgtctctactaaaaatacaaaaattagccgggcatggtggtgggcacctgtaatcccaggtactcaggaggctgaggcatgagaatcacttgaacctgggaggtagagtttgcagtgagctgagatagtgccaatgcactccagtctgggcgacagagcaagactctgtcctaaaaaaaaaaaaaaaaaaaaaaaagcgcattttgtttttttgtttatatataatgggtttattactgcccttttaaaatcaattaataaacattttgaaagttgattagtttaaacttctaatacagcaaatgccagtagataaagtttacataaacaaaaattctctacagccttcaataatttttaagtgcaaaggggtcttaagagcaaaagttttaaattagctgggcgtggtggtgcacgcctgcagtcccagctacttgggaggctgaggcaggagaattgcttgaacccaggaggcagaggttgcagtgagccgagatcgcaccactgcactccagcctgggaaacagagagagactccatctcaaaaagaaaaaaaaaaaaaaagtttgagaactactattccaataagaaaaagtcctgcatgtccacatacacatgtgcccaagcagacacgcatctaaaagaaagaaacccgaaactgaaaattccaaagtggtggccggcaggcatattttataagttccctatgctgtcttttttttttttgagacggagtctcgctctgttgcccaggttggagtgcagtggtgcaatctcggctcaccacaacctccgcctcccaggttcaagcgattctcatgcttcagccttcccagtagctgggactacaggcgcctgccaccacatccaactaattttttgtatttttagtagagacagggttttactatattggccaggctggtctcaaactcctcagccgcctcggcctcccaaagtgctgggattacaggcatgagccactgcgcccagcctacgctgtcttatttaattcttaaattatcaaatgtgttgctagcatttaaaaatcagaaggtttcacctaaggatagttttctggcctcttctcaaagaaatcgaaagttctggcaacactggcctggcatttccactgcctggcatcacttagatgggacatacaatctttgcttcacgacaatccttacttcttccctttacctgtgccttacctgtaagtatctgagttgccaccctgagctagggaaggaaaaacgttttttgcaataaacatcaataaagaaacacacatcaatctatgtctgcactcctcctaacaggtcaacatgcacaataaatagcccttttccctgtttgacttctccaaagcagtaacttgtatgattaccattagtacggactttggtattgcttagaaaccctcttgagaaagaacgagatctatccaacaaagcaggtgtctttggctcagtgcaaaggaaggaaactcaccagaagagcaagttagtgaatctccagggaacaggaggacccagtttaggccccacagggagggggttcaggtgacaagcagaccactggatatgtcctcctggaacactgagtggtaaatgcaggatactcccaatttcttttgccctgaaagcaggtggtgggaaggaagaagcagtcaggacttgggtcccaaagaaacaagaacagagatgtgaaaatggagaagagcaacaatttttggaagaaggcagaaagcagtatcaacagcggagatttgagtgaggaggaaaggtttttttggtaagaagaaataattgttccttctttccttatttttcccccgtgggaagagacctagagaattttaccgggagaaacttaattagggcagaattggtgataaaataaggatatttgctggaaagttgggggtaggtgaggaggactggaaacataaatattagacgagagagaaactggaaggaattagttggtttgttctaagcgaagatattccaaaaaggggcactctaggtgtgaagaaaaaaattttgctggaaagtgatcctgaacggatgaaaaaaaactgggttaattttttttctttttttgcgctaagggaagttacttaaaggagggggaggggcatgtcaaggaaaggaggagagatttggagttttgctggaagatcctaaaaagggataaatctgggtgccccaaagtgggactatggaggaggaagggggattctgagcagaaggggcctggaagaggctagcgaatgcaaggcccagatgcagaaggtggggaggtcgggtagggcccgcggcgcgagctggggggctgcgagggggcagttgaggcccggggggacggagtgggaaagaaaagggggtgcagcgggccaggggatcctgaggagggtcttctccaagggggaagggcctgtggggtgcagcggggcccggagctgttgggttgcagaagatgcgtgcgtgacgcagggtgaggggcgcccgccgcgcctgctgcgcccctcgaaaggcagatggggccccctaaaaaaagaaatcaagaaacgaatgagattgtaaaaagggggaggggttgaaaaaagaggaaataatagtaatgggggataaggaggaaagggaggggcaggggcagcagcaaccgggttttacccgcccccgggggctcgcgcgccgggcctcgcgcctggcgcctcgcggggctcccagcggcctcccgccttccccgcgccgcccggggcgcacgcgcagcccggcccacccccggatctcctcgctcacgcgcggcgcaggcgcgcgtacgtgaccgcgggccgcctcacgcctcccagagcggcctcgcgcgtgcctcctggccgcgcgctctcggctgcttctccgaggggcggggcttgccgcgggcgggaaaggaggcggttggtcgccattttgggagggggcggttgagggcggagagtgagaagagtgagccggggaggagcggcggggggaggggccagtcccccaagacccgcatcccgaggccgagagtcccgggagcctccactccagccattgttcctggtgggcggtgttagaacgcggtggcggccgctggatggctgcccccagtccccggaggggcctctgagcagcgtcctggtgctgggaggccgtatcgtctgtttccgaggaccctgtcgcgagcgcgggagtctctcagggtctcttctgcgtcattgggtgggggagatgtggggcgagctgctcctccctttttttaaaatttttttcagagacagggtctctccctgttccccaggctgcgatcacggctgccgcaccctccccttcctgggctcaggcgatcctcctgcctcagtctcttgagtagcagcgaccacaggcgggcgccgccacaccttgctaatttttacattttttttagagataaggtctcgccatgttgcccaggctagcctggttcccctgggctcaagcgatcctcctgcctcagtctcccaaagcattgggattataggtgagagccaccgcgcccagcctattcctcccttctttggggaaaggctgagccatctggggcccctgctccgtgctgagctgtgttgggaagggcggtaggccctggtgccgactggccaaggaccatcttttttttctttttttttttttttgagacagggtcttgttctgccgcccaggctggagttcagtggtgcgatctcggctcactgcaatctccgcctcccgggttaaagcgattctcctgtctcagcctcccgagtagctgggattacaggcacgtgccaccacgcccggctaatttgttgtattttcagtagagacggggtttcaccatgttggccaggctggtcttaaattcctgacctcgggtgatcaggtgatccgcctgcttctgcctcccaaagtgctgggattacagacctgagccaccgtgcccgacctggccaaggggtttgaactgtcctgcaactgaggcagataattcattccttagaaacggagtgctgaagatctgtggagaatgagagcagattagtggttgcccggggtggaaaggggcatcgcggatcttatctgggtaatggaaatattctaaaactgagctatgggccaggcgtggtggctcacgcctgtaatcccagctctttgggaggccaaggtaggaggatcccttgagcctaggagtttgagaccaacctgggcaacctagtgaaaccctgtctctaaaaaaaaaaaaaaaaaaaaattaactggagatggtggcatgcgcctgtagtcccagctacttgggaggctgaggcaggaggatcgcttgagcctgggagtccaaggctgcagtgagctatatgatcaggccattgcaccccagactgggggatagagcgagactctgatgggggaaaaaaagggttatggtgatggttgcacaactcagtaaatttctaaaaatcagtaagtatacacttaagtgagtgacttttatgtaaattatacctcaaagttttttttttttttaattgattattgggggaggaaacagaggaaagaagagggcctgtcatcttgctttaggatcccttcatttagcaagtttttattgggtctctgttctaggtgctcagatatagtgtctgggtcaaacagacattcctctcctcctggaacttatgttttagagcagtgctgttcagtagtaataaaatgcaaacttcaagcaccagccacttatgtaattttacattttctagtagccatgtttaaaaggaacaaaatgtaaagaaggcaggtgtggcggctggcacttgtagcccagctacttgtgaggctgagacaggaggatcacttgaacccaagagttggagactgcagtgagctatggccctgtctgtgtagagccactgcaccagcctgggcaacatagtgggacccattctcttaaaaaaaaaaaaaaatggcttgggacgggtgtggtggttcacacctgtaatctcaacactttgagaggctgaggcaggaggattgcttgagttcaggaggtcaagaccagcctgggcaacacacccaaacctaaaaatcaaataaataaaagtaaataataaaataaaagagaaagaaacacaagtgaaattaatttggtaatatttaatcccaaatatttcaacacattatcagtataaaaactaagagataatttacacttttggggctgtctttaaaaccccacatatacagtattttacattcacgggacatctcaattcagaccagccacatttccagggctccatggaaccttgtagcgagtggctctggtactgacagcatacctctacagggggacaagcaaatgcatttactttttttgttgtatttttttgatacagggtctcactatgtcacctaggctgaagtgcattgttgtaatcatgcctcgctgcatccttgacttcctgggcccaagctattataccacctcagcctcctgagtagctggtactacaggcctgcaccaccacacccagctaattttttgtatttttagtagagacagggttttgccatgttggccaggctggttttgaactcctaggctcaagcagtcttcctgccttggcctcccaacatgctgggattacaggagtgagccaccgtgcctggctgcaaatacatttataatgcagtatgttataccttgaagaaaaacaaaggaaagaggatggggtcagagggtattgttttatacaggtcagtaaaggcttctctggtgagattgcattgagcagagatctgaaggaagtaaggaagggtcctatgaaaatatctgggggaagaagagagggaacagcacgtgcacaggcactgaggcaggaagatgtggaacccttttgaaagacagcagagaggccaggcatggtggcttatgcttgtaatcccagcaatttggggggcccaggtaggctgatcacttgagcccaggagttcgagaccagcctggccaacatgttgaaaccccatctctactaaaaatacaaaaaattatctgggcatggtggtgcacacctgtagtcccagctactcgggaggctgaggcatgagaatctcttgaacctgggaggcagcggttgcagtgagccgagatcacgccattgtgctccatccttggtaacagagtgagactctgtctcaaaaaaaaaaaaaaaatcagaagaagagagaccagtgtggccagaaccacgtgagtgaagaaactaggggcagatggcatagggacttacaggtcatgctaaggcaggaattaaactcctggaaacaatttcagagggttcttcctttatttagcacactttttgttttgtggggttttttgtttgtttcttttattttctttctttttttcttttttctttttcttcttttttttcttttgagacagagtcgcgctctgtaacccaggctggagtgcagtggcaccatctcggctcaatgcaacctctgtctcctgggttcaagtgattctcctgcctcagccttctaagtacctgggattacaggctcgtgccaccacgcccagctaattttttgtatttttagtagagacggggttccaccatgttagccaggatggtctccatctcctgacctcgtgatccacccgcctcagctcccaaagtgctaggattacaggtgagagccactgtgcctggccttcttttctttttcttgttttctttttttttttcgcttatttagcacacattttaaaaatgctttgtttcagccatgtaatctctcttcttgatggaggaaataaggatcctagccactggacagatgagaatctagttaaaaaacaggacttaagctcctgaaataaattagcatcttctgtcattgatagacattgaacacttcatggacacagaagataaatgcaacacataaacaaaaaattagcattagccaagcatgcttgtaatcccagcactttgggaggccaaggcaggtggatcacctgaggtcaggagttcgagaccagcctggccaacatggtgaaacgtccatctccactaaaaatacaaaacttagccaggtgtgctggtgcgtgcctgtaatcccagctacgcaggaagttgagacaggagaattgcttgaacctgggaggttgagtctgcagtgagccgagatcgcaccattgcactccaggctgggcaacagagcgagactctgtctcaaataaaaaaaagcatttagcatttattttaaaggcctacaaattaaggtgacaacctaataaaaaaaaagaatataagatttgaagaggcacttcatacaagaggaaacatgaagtgaggactaaccacaacaacaagagaatgcaaattaaaaccaaagataccgcagcacacctaccacttcggtgaatcaaaaaacatttttttttttctgtttgctgaagcaagacgaactgagtatacaggactagtgacaggtaaaattggtagaaccacactgacaaacccaggggttaactctagaaaacttcttgatcatgtgcgccaagagatgcaacagaagaacaagcagcaatgtttgtaatagcaaaaaaaagaacagaaaagaaaggaaagaaacagattggatcctggattctggattgaataatcctggaacaagataaataaataaataaataaataggccaggcatggtggctcacgcctgtaatcccagccctgtgggaggccgaggcaggtggataacttgaggtcgagaatttgagaccatcctggtcaacatggtgaaaccccatctctactaaaaatataaaaattagctgggcatggtggtaggcacctgtaatccagctaaggcttaggaggctgaggcaggagaatcgcttgaatttgggaggtggaagttgctgtcagtgagctgagatggtgccactgcactccagcctgggaaacagagtgacagtgacttcatctaaaaaaaaaaaaaaagacattacttaaaaaactagagaaatctccaacaaaggccaggcatctgtaattccagcactttgggaccccaaggcaggaggatcacttgagctcaggagttcaagaccaccctgggcaacttggtgagatcctgtctctacgaaaaaattttaaaagttacccaagcatagtagcacacacctgtggtcccagctactccacaggctaaggcgagaggattgctttagctcaggactgcattcctatctggttaacagagcaagactgtctcaaaaaaaaaaaagaaaaaatctcaacaaagattggaatttagttaatagtaatgtatccactttttggggtttttttttttttttgagacagagtctcgctctgtcgcccaggctggagtgcagtggcgcaatctcagcttgctgtaagctccgcctcccgggttcacgccattctcctgcctcagcctcccgagtagctgggactacaggcgcccgacaccacgcccagctaatttttgtatttttagtagatggggtttcaccgtgttagtcaagatggtctcgatctcctgacctcgtgatctgccggcctcggcctcccaaatgctgggattacaggcgtgagccaccacgcccagccttttttttttttgagatggagtctggctctgtctcccaggctgcagtgcaatagcatgatcttgactcactgcaaccaccgcctcccaggttctgcctcagcctccagagtagctgggattacaggcgcccgtcaccacacccaactaatttttatacttttagtagagacggagtttcaccatgttggccagggtggtctagaactcatcctgacctcaggtgatccgcccgcctcagcctcccaaagtgctgaaattacaggcatgaaccattgcaccccgcctgttttgtgtgtgtgtgttttttttttttttttttttgagacagggtctcattctgtcgcccaggctgcagtgcagtggtgccatctgggctcactgcaatctccgcctcccaggttcaagccattctcctgcctcaccctcctgagtagctgggactacagaagtgcaccaccatgcctggcttatacattttttattttttggtagtgacggggtttcactgtgttagccaggctggtctcaaactcctggcctcaggtgagccgcctgcctcggccttccaaagtatgaggattttaggcatgagccaccgagcctggccaatgtttttgtagttttgacaaatgtatagttgtgtcacttaacaacggagatctgtctgagagatgtatcttcaggtgattttttccttgttgcgtgaacgtcgtaagctgtacaaacccagatggtatagcctagcacacagctaggctgtatggtgtagcctattgttcctaggctacaaacatgcagcatgcaactgtactgaatactgtaggcagctgaaacacaaaggtaagtatttgtgcatcaaaacatagaaaggtacagtagaccaggcgtggtggctcatgcctgtaatcccagcactttggaggccgaggcaggtggatcacctgaggtcaggagttcgacaccagcctggacaacatggtaaaaccccatctctacttaaaatacaaaaattagccaggtgtggtggcaggcacctgtaatcccagctacttgggaggctgaggcaggagaatcacttgaacctgggaggcggaggctgcagtgagccgagacctcgccactgtactccagcctaggcgatagagcgagagtccatctcaaacaaaaaagaaaagaaaagaaaagaaaaaagaaaaggtacagtaaaaatacagtattataatcttacaggacctctgtcatatgtgtagttcttattggccaaaacgttgttatgtggcacatgactgtcctgtgataaagtaagatgccaacatcagggaaagggtgagggggatgtggtaactctttgtaccatctttccaagtttccagtaaatttaaaattactccaaaataaaaagtttagggtgaaaaaagaaggaaaggaaatgaaaatgtccacctataggagactggataaatcgtggtatagttattcaatggagtattatgcagcagtgaaaatgagtcaatttccattacacacagcaacacagatgtgctcccatttacatataacatttcaacagggtgtggtgaatcgtgtctgtaatcccagcactttgggaggccgagccaggaggcatcacttgaggccaggagttcaagaccagcctggaccacatggcaagaaaaattaaaaataaactgggcatggtggcgtgatctgcctgtagttccagcttctcaggaggcagaggtgagaggaacacttgagccctggaggtcgaggttgcagtgagccatgatcccaccgctgcactccagcctgggcaacacagtgagactctgtctcaaaaataaatatcatttcaaaacacaggcaaagctaaacaataagcagtttagggacatagatagaattattattttttttaaagtaagggagccaggcatggtggcacacacctgtggtcccagatactcgggaggctgaggcaggaggatcacttgggaccaggagttctgggctgtagtacactatgccaatgcagggtccacgctaagtttggcatcagtttggtggcctcctgagagcgggggatcaccaggttgcctaaggaggggtgaactggcccatgttggaaatggagcaggtcaaaactcctgtgttaatcactggtgggatcatgcctgtgcatagccactgcactccatcctgggcaacatagcaagaccctatctcttaaaaaaagaaaaaactagccagatgtggtggcatgtgcctatagtcccagctactcaggaggctgaggtgggaggatcgcatgagcccaggagtccgaggttgcagtgaactatgattgtaccactggactccagcctggtctacaaaatgtgaccttatctctcataaacaaaacaaaacaaaataaaatggaagcccctgagaagctaagggaaaagatgctcttcagaaggagaggggtacaccctggccgcaggttcctcttctctgccaaccttttcctgttgtctccatctattcactttgttcagcattgctttctgtgatttgtcttttgaatcacgtccttcaagcattctcacactcctcactcctctcggcctctaaaggactcacctggccaaactccagccatcctcttctctgtgccagccgagcccagcagaaggaaaccacccagccagcccaacgggttttacctgaatcagagaaatcacaggcctcagacaggcgcagggcactctctatgtgtctctggtgtgcttacatttcccccctgccctccagcccatgactaggtcccacacttccctgtgcacatagaagccatcagaagggaacccccttgtcatctgtccctgtgattccctctctcaaggattggggtctccctccctccttccttccttccttctttccttccttccttccttccttccctgcctcccgcccttccttccttccttctctccctccctccctgccttccttccttccttcttcccttccacctccctccttctctccctctttcctcttccattgaagtttctcctcctctcctcctcctcccccctcctcctcttcctcctccttttcctcctcccctcctcctcctcttcctctgcctgtcctcctcctcccctcctcttcatcctccccttgtcctcctcctcttcctttccccctcctcctcctcttccttccccctcctcctcccctcctccttccctcctcttcctctcctcctcctcttcctcctgccctcccccctctttctcctccctcctcttcatttcctcctcttctcctctttctcttcctgtctcctatatcattcatcatctctctctccttctgccaaatcatgcccatcactatcctcaaatgctcctgcctcttccattcattttttaaaaagaattcctcccttgagggaaccgagagataagagagactgtagccacaaatcaaccacatgcaacccaaggactttggatgctgagtcgaacagaccaatgttttgtttcgttttgtttttaaattatcagacaagtagagaaatctgaactctgactgcctattcgatgataggaaagaattatggtgcattttttagatggatcacgggattgtggttatatttctataaacaaaccttatctccagagatatgaaatgaataatctgtacatgaaatgatgtgatgtctgggatgtgttttaaaactatctagtggggtgagggtggggccaatgagagacggtagaaatgaaacagcattggccatgagttgataattggtgaggcccagtgaccggcatgtggagttaatcatactcttttatttttatatatatttgaaaatgggcttatttaaaagtgatgtaaaaattcctctctttggctggctgcagtggctcacacctgtaatcccagcacttggggaggccaaggtgggcagatcacctaaggttgggagtttgagaccagcctgatcaacgtggagaaactctgtctctactaaaaatacaaaattagccaggcgtgctggtgcatgcctgtaatcccagctactggggaggctgaagcaggagaattgcttgaacctgggaggtggaggttgcagtgagccaagatcacaccactgcactccagcttgggtgacagagactctgtctcataaataaataaataaataaataaataaataaataaataaataaaatacaacaaaatcacacaataaaatccaacatccctcgccacatcctgtaaatctggtctgtccaccctctggcctcacctccactctctgttcaggcttgctctcctccaagcacaccaacagagcaagttcctatatgctgttccctctttccagaagattcacctggcttcttccctcccctcctcagtctatgctcaattgtcccctgctgggaggttccttccactgactattctctccagtttattttcttcgggaagctcatctctacctgacatcacgtcacacctggttgtttgttgatcgtcagtctctctgctagaatgtaagcttcatgctggcaggggctttgtctgttttgttgcctagaacagtgcctggcacgcagtagataattaattttttttttttttttagagatggcattttactctgttgcccaggctggtctgaaactcctgagctcaagcgatccccccacctcagcctcccaaagtgtgtgagccactgcacccagctaataattaatactttttaattttttttgagacagggtctcactctgtggcccaggctggagtgcagtggcacaatcaaagctcactgcagccttgacctccccaggttctggtgattctcccagctcagcctcctgagtagatgggactacaggcatgcaccaccatacccagctaatgtttgtgttttttgtagagacagggtttcgccatgttgcccaggctaatctcaaactcctgggctcaagcaatctacccaccttggcctcccaaatattacttttaaaataaatgaatttaaatctgccagtctctgacaaaatcttatttggccacagttgctttggatgtaaaaacatgcataagtaaggctgggtgcagtggatttacccagacagagcattacccagcatttacccagacagagccggacacgatggcttatacctgtaatcccagcattctgggaggctgaggtgggtggatcaattgaagtcaggagttcaagaccagcctggccagcatggtgaaaccctgtctctattaaaaatacaaaaattagctgggtgtggtggcttgcgcctgtaattccacctactcaggatgctgaggcacgaaaatcgcttgaacccaggaggtggaggttgcaaggttgcagtgagctgagatcgcaccactacattccagcctgggtgacagagtgagactctgtctcaaaaaaaaaaagatgtggctgggcatggtggctcatgcctgtaatcccagcattttaggaggccgaggtgggcagatcactttaggtcaggagttcaagactcaggagtttgagactagcctggccaacaaagtgaaaccccatctctatccaaaatacaaaaattagctgggtgtggtggcacacacctgtaatcccagatactcgggaagcggaggcatgagaattacttgaacccaggaggcggaggttgcagtgagctgagattgtgccactgcactccagcctgggtggcagagtgagactctgtcttaaaaaaaataaaaacggctgggcacggtggctcacgcctgtaatcccagcactttgggaggccgaggcgggcggatcacgaagtcaggagatcgagaccatccttgctaacacagtgaaaccctgtctctactaaaaatacaaaaaattagccgggcgtggtggtgggcgcttgtagtcccagctactcaggaggctgaggcgggagaatggcgtgaacctgggaggcggagcttgcagtgagctgagattgcaccaccgcactccagcctgggcaacagagcaagactccgtctcaaaataaaaattaaaattaaaattaaaaaataaaaaataaaaacatacataaataaaacaccgtcttccatcttcagctcagtctacatggtttctgtcataccactcctctatttgtcatgtccaatggtgggggagatcatctcaatcttgatgaaaccactcctatacattttataaagttaatcaggacagggagaaatgaaaataaacccagctggctgggcgtggtggctcacgcttgtaatcccagcgctttgggaggcccaggcgggaggatcacctgaggtcaggagttcgagattagcctggccaacgtataaaaccccgtctctactaaaaatacaaaaattagcctggtgtggtggcatgtgcctgtagtcccagctactcgggaggctgaggcaggagaatcgcttgaacctaggaggcagaggtcacagtgagccaaaattgtgtcactgcactccagcctgggtgacagagtgagactctgtctcaaaaaagaaaaaaaagaaaagaaaaaaaagaaaaggaaaaaaaagaaaagaggcccatcttccgcacactcagcattaattgtgaggccagctggctctctgacctgtttccccacaattgttttgtgcctattgtcctaaaatcatgtagaccttgttaccagattctacttcccctcaactgctctgtaaatgacaacttaaacatgataaaacgttaagttttctttttgagatgttccctcaggtcctgcatgctgatgaaatgactctgccagctgatctgagggaccccatgagatgctgactcaccaaagcatgcgatttccacgtttgggattatttcactcctttccctgaccaatcaacagggccaattctccagtcctttgtccttcatgatcacctcaaaaatcccagcccagaactcctcgggaagacgaattgagggtctgcttccctctcctccctcagtgccccacaatcattagatcctttctctgctgcaaaccctgctgtctctgtgcaattggtctgttgctgcacagcaggcatacaaacctgttgttcctgtaacactgagggagggtatggaacccaggggttgggggactgaaagggcctcatatgggaggggacaggttcttacgagaccgtcggtagcaggggtcttcattggccctgtccttcctaaagcagcctcctctaagctgacttgatgccacacaagtctgttctcctcctaggaagaagtcgctgttggcaacatccccacccagccccactctcctatcccccagctgctagtggctcccagctgtccctccaaggcaagtttccttcagcaaaaccacctctcctgggaggctacacctggtaacccccagccactggccgactgaccagcctgggcaacatagcaagaccttatctctactaaaattttttttgaaagttaacaaggcatggtgacatgtgcctgtagtcctagctacttgggaggctgaggcaggaggatcccttgagcccaggagttcgaggatgcagtgagccacgattatgccactgcactccagcctcagtgacagagtgaaaccctgtttctttttttgtttttgtttttttagacggggtctcattctgtcacccaggctggagtgcagtggcatgatctcggctcactgcagcctctgcctcccaggctcaggcgatcctctcacctcggcctcctgagtagctgggactacaggctcgtgacaccatgtctggctaattttttttacttttattttttatttttggtagagacagggtttcaccatgttgcccaggctggtcttgaactcctgaactgaagcaatccacctgccttggcctcccaaagtgctgggattacaggcatgagccactgtgcccagccaagagtgagaccctgttattaaaaaaaaattaaaaaaagaaaattaagggagagggagagaaggaaaaagaaataattttggatttcctttgtcattcaataagtactaaactatgaggtgttggggtggccatatttctatatctgatcttagcatctcccttttaccagttagctacagctgtgtaacaaatcaccaaaaaacatagtggcataaaataacaaccatattttttttttctcatgtgtatttgagtcctcaagattatcctggtgacccgggccaggctcagatgaccttggctgggctcactcatgcatctgtggtcctctggtgggttgaccagagactggctggtttggaatgccttcagctgggatgactcagttcttccctacctttctctcacattcctccagcaagctggcccacacatgttctcatggcgaagacagaggagcaagagatagaagagaaatacgcaaagcccaaggcctgttcatgaagctggtacatttttgttcttttttttgtttgtttgttttgttttggagacagagtctcaccgtgtcacccaggctggagtgcaatggtgtgatcttggctcactgcaacctctgcctcctgggttcaagcaattctcctgcttcagcctcccaagtagctgagattatagctgtgtgccaccacacctggctaatttttgtatttttagtagagacggggttttgccatgttggccaggctggtctccaactcctgacctcaagtgatccgcctgcatcagcctcccgaagtgctgggattacaggcgcgagccaccacgcccggcctgggcttctactttctcactcctcttcccagtcagtcaccattctacctttttgtgggtcagtcctcttgtttccatccccacgcctccacactggtccaggccaccatcacttctcgcctggaccgacaatgacaatgacacataagggttggaggtggaggttatggggtgggggttggccctgggtttcaatcctggttctgctgtgtagtagctgagtgccctcaggagagtgactttacctctctgtgcctcagtttcctcctccataaagtggggatgattagctgggcatagtggtgcgtgcttgtagtcttagctactcaggagtctgaggcgggaggatcccttgagcccaggaatttgaggttgcagtgagctatgattgcgccactgcactccagcctaagtgacaaagcaagaaactgcctaaaaaaaaaaaaaaataggccaggcatgatggctcacacctgtattccaagagctttgaaagacccaggtggggccaggtgcagtggctcacacctataatcccagcactttgggaggctgacacgggtggatcacctgaggtcaggagttcgagaccagcatgaccaacatggtgaaaccccgcctctactaaaaacacaaaaaattagccgggcatggtggcaggtgcctgtagtcccagctacttaggaggctgatgcaggaggattgcttgagcccaggaggctgaggtgcagtgagctatgattgaaccactgcacattccagcctgggtgacaaagtgagaccctgtctgtaaaataaaagtaaaaataaatatgccaggtgcaatggctcatgcctgtaatcccagcactttgggggactgagatgggtggatcacttgaggtcaggagtttgagaccagcctggcccacataagtgaaaccctgtctctactaaaatatacaaaaattagccagatgtggtggtgcaaacctgtactcccagctactcgagagtctgaggcaccagaatcatttgaacctgggaggcagaggttgccatgagctgagcctgcactccaacctgggtgacagagtgagagtgtgtctgaaaataaataaataaataaaataaaaagaacagtgattggcacacagttgtcacgccataaatgtatttactgtttgcaataaggagaggtttgttctcaggtaacaaaacatacactagagctataatcattaacacggtgtggtgtggggcacaaaaacccacaagtaggccaggcatggtggcttccactgtaatcccagcactttgggaggccaaggcaggcagatctcttgaggccaggagttcgaggccagcacggcgaaaaccacatctctaccaaaaatacaaacattagcaggttgtgatagtgagtgcctgtagtcccagctacttgggaggctaaggcatgagcatcgcttgaacccaggagacagaggttgcagtaagctgagattgtgccactgcactccagcctgggtgtcagagggaaactctgtctcaaaataaagaaataaagaaatggaaataaaaataataaagtggggatgaggataacacctacttgtaaggttgtttcttgaggggatccagaaagtaaccatatctgaagaactcaggactgtcctgggttgtgtaattgactggaataaatggcggatgggatggtgttgggaaattgattccgactgatgggcaaggtttgtgctcagcacatccctggtctcacaccaatcctaggagttagtcccatttttctgacgcagtagttgaggcttaaagaagttcagtcacatgcccaaggccacagttcctgaaaagctgggccaagacttgaactgagatctttctgattcctaagtttctctttcctattgtaagcaccggctttctccctggtctccctgcttgccctcttattccccctccgatcttttcttcccatgtcagccaaagggattccaggaaagggcaaagatgattaagttttttccttcctaagatccttcggccatgtgacttgatgcaatgtatgatcctgtgttgaatcctgggctggggaaaacattgctataaaggattttattgagacaaacagatttgaatttgtggattaaacaattgtattattgtatcaacgtttcatttcctgtttctgattcttgttctggattttttaaagagcatgtctttgtttttagtaacgtcatgctgaaggatttagggatcaagggacacgacgtcttccactgcctctcaaatgttcagaaaagaaacatacagcagaggtggccaaatgttactgacttgcgaatccaggaaagatctacttacctttcttgctagttttctgtaagcttgaaattattgctggtaaaaaacaaaacaacaacaaagcaaaccttcattccactcctaggtagatatccaagagaaatgaaaacatatattgacacaaaaaacctgttatgggtgggtgtggtggctcacacctgtaagcccagcactttgggaggctgaggctggtcaatcagttgacatcaagagtttgagaccagatggccaacatggtgaaaccctgtctgtactaaaaatacaaaaaataaaaattagccaggtgtggttgcgggcgcctgtaatcccagctactcgtgagactgaggcaggagaatcacttgaacccaggaggtggaggttgcagtgagccgagattgcaccactgcactccagcctaggagacagagcgagactccgtctcaaaataaatataaataaataaaaaaataggtgttcaaacaataacttgtacataaatgtccatagcaacactattcacaacagccaaaacaacactattcgcaacagccaaaagagagaaacgtccatcaacaagtgaactgataagtgaaatgtggtctatccatacaatggaatgttattcagccataaaaaggaatgaagtacttactgatactttttttttcttttttttttttttttgagatggaatttccctcttgttgcccaggctggagtgtaatggcacgatctcggctcactgcaacctccgcctcctgggttcaagcaattctcctgcctcagcctcccgagtagctgggattacaggcatgcgccaccacaccaggctaattttgtatttgtagtagagatggtgtttccccatgttggtcagactggtctcgaactgacctgaggtgatctgcccgccttggcctcccaaagtgctgggattacaggtgtgagccactgcgcctggccaaagtactgctacttgaatggatgaaccttgagaacattatgctaactgaaggaagcctgtcataagggactacacactgtatgactatttttatgaaatatccagaacagacaagtccatggagacagaaagtagattgatagttgcccagacctgggggacgggagataggaagcgactactaacgggccagcggttttgtgctgggatactgagatgttctgaagctacatagtgatgatgtttgcacagcactgggaatatatgaaaaaccattgaattatacattttaaaatgatgaattttgagccaggtacagtggtgtgtgcttgtaatcccagctactttggaggctgaggctggaagacggccggagcccaggaattcaagaccagtctgggcaacatagcaagatcctgtctctactaaaaaaaattaaaaattggctgggcgcagtagctcacgcctgtaatcccagcactttgggaggccaagcggggccagcctgaccaacatggagaaaccccatctctactaaaaatacaaaattagccgagcatggtggtgcatgcctgtaatcccagttactcgggaggctgaggcaggagaattgagaacttgggagccggaggttgcggggagccgagatcatgccattgcactccagcctcggcaacaagagcgaaactctgtcccccaaaaaataaataaataaataaggagttttatggtaggcaaattatatcagaatttttcttttttttttttttgagactgagtcttgctctgttgcccaggttgaagggcagtggtgtgatctcagtcaccaaaacttctgtctcctgggttaaagtgattctcctgcctcagcctcccaagtagctggaactacaggcacccactaccatgcccagctaatattttgtgtttttagtagagatggggcttcactatgttggccaggctggtctcaaactcctgacctcaggtgatcctccctcctcggcctcccaaattgctgggattacaagcatgagccaccgcacatggccgaattatgtaacaattaaaaaaaacagcaaacactttaatgactgtagattacctctggggtcaaaccccaaatccctggtgtacctgcaagtctgccctgtccctcagaccatctcagccaaactgctgactttctagccacctgcctttcctccttccccagtgctaggcctttgcatctcctcttcccttccaccctcatctgacaactctattcatctcacaagtcttagctgactggccaggagcggaggctcacacctgtaattccaacacttcaggaggccaagaccagagggttgcttgagcccaggagttcaagaccagcctgggcaacatggtgaaaccccatctctacaaaacatacaaaaaacttagccaggtatggtggcacgcatctgtagtcccagttattcgggaggctgaagtgggaggatcacctaagcccaggaagtcaaggctgcagtgagccatgatcataccactacactccagcctgggcgacagactgggactctgtctcaaaattaaaattaaaattaaattaggccaggtgtgatggctcatgtctgtaatctcagcactttgggaggccaaagtggtcagttcacttgaggtcaggagttcaagaccagcctggccaacatggtctctactaaagatacaaaaattagctgggcgttgtggcaggcacctgtaatcccagctactcgggagactgaggcaggagaatggtgtgaacccgagaggtggagtttgcagtgagccgagatagcgccactgcactccagcctgggcaacagagcgagactccgtctcaaaaaaaaaaaaaaaaaaaattaaacaacctggagcttgagatcggcactggaagtagggaacaggcttggctcagtggcttacacctgtaatcccatcccagcactttgggaggccaagggggacggatcatttgagcttcagagttcaagaccagcttggccaaaatggtgaaactgtctctactaaaaatacaaaaaattagccaggtgtggtggtgggtgcctgtaatcccagctacttgggagggaggctgaggcatgagaatcacttgaaccccggaggcggaggttgcagtgagcagaaatcacaccactgcactccagcctgggtgacacagggagactccatctcaaaaaaaaaaaaaaaaaaaaaagagctcagtaactcaggcctataatcccagcactttgggaggccaaggcgggcagatgacctggggtcaagagttccagaccagcctggccaacatggcgaaaccccatctctactaaaaatacaaaaatgacttggtcgtggtggcgggcgcctgtaatcccagctacctgggagactgaggcagaagaatcgcttgaacccgggaggcagaggttgctgtgagctgagattgtgccatagcactccagcctgggcaactcttttgagacagagcgagactctgtctcaaaaaaaaaaaagaagtggggggcaatcttgtgggactcagccttcaacctgtgggatctgatgctgtctccaggtagatagtgtcagaagtgaattgaattggaggacaggctggtgtcccctggggggagaagatccccctcatatctagtgacagagcgtgttgtgagtgtgtcgtgggacaaactgtttgtgtattcctctattctcagaattccctgcactgtcttttcctaacaattcctctttatcctcctcctcctccaggaagccttcccaaaccccaggctgggtcaggtgcctgctctgagctcccacatccccaggactcactccccctatccactttagggagaagtctgtaacctccacagacccgagagttccacgaggtagaccccagggtctcccagtaaccgccacagagcagataccgacaaacactcattgcattgacctaacctcactccaccaccatctccccagacctctcggttcttgccttccaccagcccctcaccaaccatttttggctcttctccttgcctatgctgctgccatatgtatgattttttattttacttaatttaatttaatttatttatttaaggtggagtcttactctgtcacctaggctggaatgcagtggggccatcttggctcactgcaaccttcacctcccaggttcaagcgattctcctgcctcagcctccccaatagctgagactacaggcacacaccaccacacccagctaatttttttctctctcttttttttttttttgttgttgttgagacggagtcttgctctgttgcccacactggagtgcagtggtgtgatctcggctcactgcaagctccacctcccgggttcacaccattctcctgcctcagcctcccaagtagctgggactacaggcgcctgccaccacgcccggctaattttgttttatatttttagtagagacggggtttcactgtgttagcaagtatggtctcgatctcctgacctcgtgatccgcccacctcagcctcccaaagtgctgggattacaggagtgagacaccgtgcccagccacgcccagctattttttttttttttttttttgtatttttagtagagacgggattttgccatgttgtccaggctgatctcgaactcctgatctcaagtgatccacctgtctcagcatcccaaagtgctgggattataggtgtgagccaccgtgcctggtctgtattattttttatttttatttatttaattattattatttgtttttgagatgaagtttcactcttgttacccaggctggagtgcaatggtgtgatcttggctcaccacaaccttcgcctcccaggttcaagcagttctcctgcctcagcctcccaagtagctgggattacagggatgcactaccacgatcggctaattttgtatttttagtagagatggggtttcatcatgtgggtcagggtggtatccaactcctgacttcaggtgatccacccacctcggcctcccaaagtgctgggattacaggtgtgagccatcacacccagccttatttcccacgccgagacagagtcttgctctgtcgcccaggctagagtgcagtggcaacatctcgactcactgcaaactccgcctcccgggttcaagcaattctcctgcctcagcctcccgaggagctgggattgcaggcatgtgctaccaggcccagctaatttttgtgtttttagtagagacggggtttcaccatgttggccaggctggtctcgaactcctgaccccgtgatctgcctgcctctgccatccaaagtgctgggataacaggcgtgagctactgagcccaatcaatttttaaaaatcatatatactcaacacctttgcttttaaaaaacccttaagcattttttaaaatacaattttgttttatttcagatggagtcttgctgttgtcggcctgggctggagtgcaatggcgcgatctcagctcactgcaacctctgcctcctgggttccagcaattctcctgcctcaccctcccgagtagctgagattacaggcgcctgccaccacacccggctaatttttgcatttttagtagagacagggtttcaccatgttggccaggctggtcttgaactcctgacctcaggcgatccactcaccttggcctcccaaagggctgggattccaactatgagccaccgagcccggcctattttttcctcttttgatcgtgatgattctagtgggtgtgaggttgtatctcattgtggttttgacttccatttccctaatactgatgactgagcatcctttcctgtgtttcttggccatttcctcaccaccttctgcaagctgacctcagccctcaccacctcactgaaccatcatttccaccttcaccagtccagtggtttatcttaatttcccttcttttctctctcagcaactttggacacttcctccctcgccagccattcttggtcttcgtcttccttttctggagagaaatgtaagaacttaggccagttagttaacttctctgtgcctcggttcttcatctgtgaaatgaagatgacaacagctcctacttcaaggttgctgtgaagattccatcagctaatgtatgtaaagggctcagaagtgttgggaggccttggccaggcgcggtggctcacgcctgtaattccagcactttgggaggccgaggcgggtggatcacgaggtcaggagttcaagaccagcctggccaagatggtgaaaccctgtctctactaaaaatacaaaaaattagccgggtgtggcagcgggcgcctgtaatcccagctactcgggaggctgaggcagagaattgcttgaacctgggaggtgcaggttgcagtgatcgaagatcgtgccactgcactccagccttggcaacagaccaagactccgtctcaaaaaaaaagaagtgttggaaggcccaggcaggcgcatcattggagcccaggagtttgagtccagtctgggcaacatggtgaaaccctgtctctacaaaaaatacaaaaattagtcaggtgtggtggtgtgtgcctttattcccagctagccaggaggctgaggtaggaggattgcttgaggccaaggggttgaggctgcagtgaactatgattgcctgtagtcccagctactcgggagactgaggcaggagaattgatggaacctgggaggtggaggttgcagtgagctgagatcgcgccactgcactccagcctgggtgacagacggagactctgtctcaaaaaaataaataaataggccaggcgtggtggctcacgcctgtaatgccagcactttaggaggctgagttggggagatcacaaggtcagaagatcgagaccatcctggccaacatggtgaaaccctgtctctaccgaaaatacaaaaattaggtgggtgtggtggctcatgcctgtagtcccagctactctggaagctgaggcaggagaattgcttgaacccaggaggcggaggttgcagtgagccaaggttgcgtcactgcactccagcatggcgacagtgagactctgtctcaaaataataaaaataaataaataaatataattttaggaaaagtcaccagaaattcaaaacaaaaacaaactccgttgcagaaatcggatgtgaaaattgttcactttcattcagaatctgcgggtcggccaggcgcagtggctcatgcctgtaatcccagcactttgggaggctaaggcaggcggatcatgaggtcaggagatagagaccatcctggctagcacagtgaaaccccgtctctactaaaaacacaaaaaattagccaggtgtggtgatgggcgcctgtagtcccagctactccggaggctgaggcaggagaatggcgtgaacccgggaggcagagcttgcagtgagccgagatcgtgccactgcactccagcctgggccacagagtgagactctgtctcaaaaaaaaaaaaaaaaaaaaaaaaatctgcgggctgaagccaggtgcggtggctcatgcctgtaatcccagcactttgggaggctgaggtgggtggataacaagttcaagagatcaagaccatcctggccaacatggtgaaaccccgtctctactaaaaatacaaaaattagctgggtgtggtggcacacacctgtactcccagctacttgggaggctgaggcaggagaataacttgaaaccaggaggcagaggttgcagtgagctgagatcacaccacggcactccagcctggcgacagagcaagactctgtctcaaaaaaaaaaaaaaaaaaaaaaaagaataaacagaatctgcttaagattcttatatctttagcttttaaaacaatacatctaaagacagaaaacgtttacatggcacagtgtaatgtggtgattaagagtatgaattttggagcaggtgcagtggctcacatctgtaatcccagcactttgggaggccaaggcaggaggatctcttgagcccatgtgttcgagaccagcctgggaaacaggacaagacctcatctctacagaaaaataaaaatagattagccaagcatggtggtggcacctgtggtcccagccactgtggaggctgaggttggaggatcacttggacccaggaagtcaagtggtgaacacgttgttgcactccagtcagcgagatccctgctagaaaaaaaaaagtataaattttggaacagggctgcaaatccctgtgccccctgactctgacaattttgcaacttctctatgactcagtttccgtatcagcaggaggtgatattagcatatcctacctgctaggattgttggaggcattcaatgagagcatccaagtacagaaagaagctcggttaagcattacttataactacattgtaaatccccctctagccatgggtgacttttatagccatctgaacaatgtttcacaaaccctgtagtaaaaaggggatgatccgcctgtctcggccccgcaaagtgcaggattacaggtgtgagccaccgcactcagccgagatctgttaacagactccaaatctcgacttagtctcattgctgcaagcggtctactcattctctcctccagatcttcgggaacagagtaataataaaaatcaaaacccagccagctcttcctctgtcagtggtgttgaccagcagagaccgcttcccttcttaaaggggcctttcctagtttcgactttctcttctctttcctaagatggcctggtgcgtttctcctgtcaccctcccccaagcatagccaaggaagcggcccctcccacatagttggaatgttaaatatctcagtgatgactacaaggcttaaagcaacaaataaataaagccactcttgagtcagaatattttatttggtggtgcatgagtaacaatacccgataaatgaagacacattcttagcgtgttctctatcccccaaacgctgcggggtgcaggggctgcgggggctgcaggtgggaggtccacagcctctagggcaggagctctagggcaagagcaggagcaaagggacatgtggatgaaaacgggaaattctcagaatttgtgtatttattggattttttgtgtgtatttctttgaatgtttttgtgtatttgatttttttgtgtgtgcacgtatttgaatattttgtgtgtatttttttgaataggtgacactaggctcaaactttacaaaggtagaaaaagacctaacatccacccacccctgtttccccacggaaaactgctgtgaccagtttgctttttttttttttttccctagacaaagtctcgctctgtcacccaggctggagtgcagtagcggctcaccgcaacctccgcctcccaggatcaagcgattctccttgctcagcctcccgagtagctgggattacaggcgcgcgccaccatgcccggctaattttttgtatttttagtagaaatggggttttgccatgttggccagtctggtctcgaactcctgacctcatgtgatccgcccgcctcggcctcccaaagacctgggattacaggcgtgagccaccgcgccctgccgcagttcgcttctgcttttcaagatattctgtgtatttaacaagcaaaagcttgtattttttcatctccaccttttacatttttatacctttttttttctcctctcctaccttgtcaggctacatagctcataccgtgtcagttcaagtatcccttcctcgttttacggtgactccgcatcccattgcgggccgcaccactgcttatctgagtcccccatcgatggacaactaggttgtttctggtctttttttttttttcccacaaatttttacgagaacaacaacaaaaaaaacaatgctactcaacctcaccccttggttagtgtttgtcaaaaaacggacaggcagaagccccaacctgcgccccccaacgcccgactctccgcatccgccgagggtaccccagctccagggatcgcggtgctcagggaccgcgcgtccaggactggccctgcctcccagaagctgtcaggcggcggccgtggcccgctgtagccccgccccgtggcccgcccgcagtaggcccgattcaaatctggccaatgatagtgtgtaaacaaacccaggccccgcctcccgacgaataatcccccgaccggcgagaggcccatttaacccgatggggtttggggttgggacggtgatggagtcgtggctccgcccccagacctgggccaataggcggctgggctccgcccccggcacttgccgcgctgaggacccgaggcagggctgggcgcgcagttgcctgatttcgtggcggctcgcagtctgggcgctccgggcgctcggcgcgggcgggcagggccaggagctggggcggcgcactccgcggtcccagccgcatttgaagggagcggtcagagggcggagatcgccccggcatcaatgccctctcatcccccactttatttccaccgcctagctgctaaaatccggacccggaaacgtctccaatgggaacttgttcccctcgcccctatttaacagaacctggaggggacgcaggggtgtttttggattgggcaaggctttcatttctttcccctggttcttacatgcatacgggaaaatgcacgtatcttgtgcgccgctctacagaaaactaaaactccatgtggcaccagcagcctcccaggtcgagaaacaacttgggttggagaaattttcttttcgtttctttgcttttctttctttctttctttctttttgagacggagtttcgctcttgtcgcccaagctggagtgcaatggcgcgatctcggctcacccacaacctccgcctcccgggttcaagcgattctcctgtctcagcctcccgagtagctgggattacaggcatgcgccaccacgccttgctaatttttgtatttctagtagagacggggtttctccatgttggtcaggctggtctcgaactcccgacctcaggtaatcctcccgccttggcctcccaaagtgctgggattacagacgtgagctaccgcgcctggcctgaacattgtcataataaaatgtttggggacaggggcagatttgggtgcctgacgatacactcccattgaagagatgagaaaatggaggagctggagaagtgacttgccctaggttcatctggtgactcagccacagaacacctgggtgtactgatttagtccccaccctgcctggctggccttggggacaagtcgctgaacctgtctgggtctgactgcctaactcagtgcttaacctaggactcataacttgcgcctgattctcaaatagaaggggcgtgtcactcccgaaggacagcaggtctctttcgatctgggcccatattgatccccaacactggtctttggtcatccctttggctgcctctgaccttccccactgattctagaacagtgtggaccacactcactcattaactctgaaacttggacaggctttccaggatgtcaggggacagacaggacagagcaggaaaaacagacgtttgctctcccagggcagggattgccagggaatcaatgccctttgatccacccccttagttccactgcctggtagctaaaacccagatgctgtaccaagggatcgtttaaaaaattccatttgagaatcatatgcaagttatgagtcccccattaagaactgagttggtgcctgtaatcccaccactttgggaggccaagatggggggatcacttgaggccaagagttcgagaccagcctggccaatatgatgaaaccctgtctctactaaaaatacaaaaactagctgggcatggtggcgggtgcctgtaatcccagctgcttggaatcgcttcaacccttggaggcgcgcgttgcagtgagctgagattgcgccactgcactccagcttgcgtgactgtcaagaaagaaagaaagagaaagaaagatagagaaagagaaaggaaggaagggtgaggtggctcatgcctgtaatcccagaactttgggaggccaaggctggcagatgacaaggtcaggagttcaacaccagcctgaccaatatggtgaaaacccgtctctactaaaaatacaaaaaattagctgggcgtggtggtatgcgcgcatctgtagtcccagctacttgggaggctgaggcaggagaattgcttgaacctgggagatggaggttgcagtgagtcaagattgagccactgcactccatcctgggcgacagagcgagactccatcatctaaaaaaagaaagaaagaacgagagagagagagagagagaaagggctgggcacggtggctcacgcttgtaatcccaggactttgggaggctgaaggcaggtggatcacttgaggtcaggagttcaaaaccagcctgaccaacatggtgaaactccgtctgtactgaaaaaaataaaaataaacatttgctgggcatggtggtgcatacctataatcccagctacttgggaggctgaggcaggagaattgcttgaacctgggaggcggaggttgcagtgagccgagatcgcaccattgcactccagcctgggcaacaagagtgaaactccatctcagaaaaaaagaagagaggatagagagagaagggaaggaaggaaggaggaaagagagaaagaaaaaggagggaaaaagagaaagaaagaaagagaagaaaagaaaagaaaaaagaaaaagaaagaagtaactgagttgagcagtcagacccagacaggttcagtgacttgtcccagggtcactcaggcagggtggggactaatggctatcagccatggctaggcatggggctggcctctttttatctttttttgagacggagttttgctctcgttgcccaggctggagtgctatggcgcgatcttggctcactgcaacctccggcttccggattcaaacaattctctgtcctcagcctcctgagtagctgggattacgggcatgtgccatgatgcccagctaattttgtatttttggtagagacggggtttctccatgttggtcaggctggtctcaaactcccgacttcgggtggtccacctgcctcagcgtcccaaagtgttgggattacaggcgtgagacaccgtgcccggcctgagtttttttgtttttttgagacggaatctccctctgtcacccaggctagagtgcagtggcgcgatctcagctcactgcaacctccctcttttgggttcaagcgattctcctccctcagccttccaagtagctggtactacaggtgcgcaccaccacgcccagctaattttttctatttttgtagagatggggtttcgccgtgttgcccaggctggtctcgaactcctgagctctggcaatctgcccacctcagcctcccaaagtgctagggttacgggcgtgagccactgcacggggccagggctggcttcttgttggtgtcctctgcaccctaccagagccattccaagtggcatggccccaagaccatctccctaagaggtcaggtgtgtgtatgaggtgggtggatgttgttaatatctattcagcaaacttttattgagcatttactaagcaccaagcactgttttaggggcagtggatattctacaatgtaccaaaggaacctgggaactgccaaaaagggcatgaccaagggaggtaaactgaggctcgcaaaccgaggctaattaagcgacttatttgcttacttgcttgttggctgtgttgcctaatagattgtgagttgtgtgggaggcaaatagattgtgagttgtgtgggaggcaaatagattgtgagttgtgtgggaggcaggaacccgggtggtgttggtcaccacaggatccttgacacactagatactaaaaaaatatgaatgaatagactctgacgaagtctccagtgagtcccctagttctgagtcccccggggctggcagctatgacagaaacacaagtgctacacttcaggtcccagtgtacagtgacggcttcagatgagggctgcgtctcactttgtgggtgcgtgactgggcaaaacacttcccttctcggagccaattgagttttctacactgtatgatgggggtaactaaaggtctctcccctgtgggcagttctcatcagaaactgtgttcaccacccagttaacactctaaaagtgtagctccatcagtggctgtggaagtgcagagttaggaagactcagactatacaaacataaagtaaaaaaagtgtatactgctgcttctcagagggtccacacacctccagtgggtggtggatgatcactgcttgtttttgtttttttgtttgcttgtttgttttgtttttgagatggagtcttacttttgttgcccaggctggagtgcaatggcgtgatctcagctcactgcaacctccgcctcccaggttcaagcgattctcctgcctcagcctccccagtagctgggattacaggcgtcttctaccacgcccagctactttttgcatttttgtagagatgggggggtttcaccatgttggccaggctggtctcgaactcctgacttcaggtgatccacctgcctcggcctcccaaagtgctgggattacaggcgtgagccaccgcgcccggacttgtttttgtttttgtttgagacggagtctcactctcgccgaggctggagtgcagtggcgtgatcctggctcactgcaacctccgcctgccgggttcaagcaattctcctgcctcagcctccagagtagctgggattataggtgtgcgccaccatgcctggctaatttcttttgtgttattattattatttttttgagacagagtcttgggctgttgccaggcgagtgcagtggcgcaatctgagctcactgcaaccaccacctcccgggttcaagtgattctcctgcctcagcctcctgagtagctgggaacacaggcacatgccaccacgcctggctaatttttgtatttttagtagagacggggtttcaccatgttggccaggctggtctcaaactcctgacttcaggtgatccacctgcctcggcctcccaaaatgctgagattacaggcatgagccaccgtgcccggcctgtttgtttgtttgttttgagacagactcttgctctgttgcccaggctggagtgcagtggcgcaatcttggctcactgcagcctcgacctctggtgttcaagcaattctcgtgcctcagcatacgccaccatgccgggctgatttttgtatttttaatacattagattttgtaatttttgtattttcgctgcgttgaacaagatgctctggaacccctcacctcaagtgatctgcctgccttagcctcccaaagtgctgggattatgggtgtgagcccctacacacctgggccatggaggcttttttttcttttattgcatgatgcctaggtttggggtacgaatgagcccgtcacctaggtactgagcatagtacctgaaagttagttttgttttgtctttttttttgagacagagtctcactctgtcgcccaggctggagtgcaatggcatggtctcggctcactgcaacctctgtgtcccgggttcaagcgattctcccacttcagcctcccaagtagctgggactacaggcatatgccaccatgcctggctaagttttgtatttttagtagagacagggtttcactatgttggcgaggctggtcttgaactcctgatctcgtgttcctcctgcctcggcctcccaaagggctgggattacaggcatgagccaccatgcccgcccccgaaagttagtttttcaacatttgtctcctatccctacctccccactctggtagtccccagtgtttatctgtcccatcttcatgtccatgcatacccaatgtttacctcccacttataagtgagaagatgaggtatttggttatctgttcctgtgtcagtttgcttaggataatgacctccagctgcatctgtgttgctgcaaaggacattatttcattatttatttatttatttatttttgagacagagtcttgctctgttgcccagcctggagtgcaacggcgctatctcggctcactgcaacctccgcctcccaggctcaagtaattcccttgcctcagcctcccgagtagctgggactacaggtgcctgccaccacacccaaataatttttgtattttcagtagagatggggtttccctttgctggccaggctggtctccaactcctgacctcaagtgatccacctgcctcggcctcccaaagtgctggaattacaggtgtgagccaccgcaccaggcttcattcttttttatgactgcatagtattccatggtgtacatttatcacattttctttatccaatccactgttggtgggcacctgagttgattccatgtctttgctattgtaaatagcattgcggtgaacaccactgtactaagttatagatctatcatgcttttatgtttgggacattgcataaggtattcacttgtggaactgataacttcctgtttacttactaatgataacggccagcatttatatggcacttcctctcaggtgcagctctccctagctcattcttcctcatgaccctatgaaatgaggcctattattatcagcatgttaaagatgaggacacacagaggtgaggtaatttgtccactgtcacacagcaagaaagtggcaaaggcaggatatgaaccaggggctgactggtttcagtcagggcccttaccctctgtggtctctcaaaattaatttcttcttcttctttttttttttgagacagggtcttgctgtctcccagactggagtgcagtggcatgactatggggaactacaacctcgacttcctggactcaagcgatcctcctgcctcagcctcccaagtagctgggagtacaagcacacaccaccatgctgggctaatttttgtttggacagggtctcgctatgttgcccaggctggataaattattattattattactatttttgagacagagtttccctcttgtcgcccaggctggagtgcaatggtgtgatctcggctcactgcaacctctgccttccggattcaagcgattctcctgcctcagcctcccaagcagctgggattacaggcgtgcaccaccacacccagctaagttttgtattattagtagagaaggggtttcaccatgttggccaggctggtctcgaactcctgacctcaggtgatctaccctcctcggcctcccaaagtgttgggattacaggtgtgagccactgcgcctggccgataaattataaaaaaaaaaaatacgttgaagtaaatattatgggtagtaccgccaagatactagaacacatgttaaggcttaaaaaaacagaggccgggcactttgggaggccgagaatagcttgaacccaggggacggaggttgcggtgagcctagatcgtgccactgcactccagcctgggcgaaagagcgaaactccgtctcaaaacaaaacaaaatataacacaacaacaacaaaatcacaatctgtctcgattactcatttattcaacccgcattcacctactgtgtgcacgagcttttctagggcactggggaggcagaagggactaaaacaaagtataaatctccctgggctgcaagcatcgggagggcaggtccgggggctctgtgtccccactgggcccccagcactgcgcagcgcacacagtgggcgctcaccaagcgctcgctaagggcaacgcgtgaatccgtgtcccgccagcagggcgtttacggcctggtggggcggaaacggacccgacaccaccgcggcgtcctggggcttctgggaatcccatcagcgcggccagagcggccggggacaggctccgaggcaggcccgacccgcctccccggcgccgccgtggctcgacggagaccagctagggtgagtgatcgagccacgcctggggtcccggcctgtcaccccgaagtccccgccgccttccaccctgtcaggctccaactctgggctccggcgcggtcccacctccggggggaactcccctccatcccctccatttccttcatcctcgactcccgctatcttttcggacctgcggcgctccccctggacgcgtcctcccgccggacgaccgtcctccgcctcaggggacgcgcccaggacgcacggcgccccctccccagccggaccggcggtctgggagcgcggatcccttcagctcccccgcgccccagcatccggatcagggctcgaggcagtcgacaaactacacccgagctcgagcaggcgcgcccctgaacccccgggactggggctgggggcgggggcggcgccggcgcggagggcccagtccccggacgtccgcagcctcccattggctccgggtcccgccgctcggcctggcggggccggggctggtccgcccggacgcggggcggggattcctgaagcccctcctccggcgagggcggagggaagaggaggaggaggaggaggaggaagggggtggggggcggaacacaaaacctgagaggtttttttttttttttttccgtttgcatttaattaaaaaaaattttttttttttttgcatacccgaggggcgctccccggaacgggcgcgggcccggggcgcgcgggcctgggcgcggggcggcggcgggggcccggcagcggctgccgagcggccgccatgcgatcaggcagtgcgctgaccggcccggccggccggccccttctgggtcctccctttgcagcccgtgcggggccgtctcggagaccccgcgccgacggctgctcaaacatcagggtgagtttctcacaatgtagcaatttctctttaaatctcttaactctctctacctgcgagtcggggctgtgacagggcgcaaaagcgaggggggagtgggggttggcggcgagggtgtgtgtggggggagccggagccggggccgaacccacccccgcgacactctcacactcagccccccagccggggcgcagcgcccgctgcctccttttttttttttttttttttttcctgctcggcgcccaccgccaccggcacccccagccccgcgtctcttccaccaccgccgccgccccgatcctatggggacccccccccaaccggcttccctgcccagacccggcgcccagtgcctccccggccctcccgccggctgccggggatacaatggagcggcggagagaggagacctaacgttccacggggggaggggcgcggagaccccctccccgtcccggccccctcccctcgccccgctccccgcctttcggggaaggcgaaggccaccgggcagcgggcggtgatctcccggccggaggcggagagcctgcatctccccgcctcgctcggcccctgcgccccctccccaaatccctcccgtgggtgtcgcggacagtggggggccctggaaagctggggagggatggatggggaaggaggccaccggggctccccccttcgcaccgcccctaaacaatgaaaggagttgacttgacccccagcccccggcaatagagggaggtgaccccctcccccacccccagctgaggctcatcccggagggggccgttacgggggtggggggggtgagcgcctcctgtcacttcccgaggttcggggcggccccccatctcctacccctcggcctgggaacgggaggcaccaggcccggccggggcaccgcgctcgggtggtgacctttagacaaaggcagccctttccccggggtgagcccggacgagctgggcctgcggcctccccgggcccctgcggagggcagccaggccgcgggcacccggagggagggatggaggaggagggaggagggatggagccatctggttttcccatccctggctgcccctcgtctgcttccccgactcctgtcacgggcggccgcggggagacgagggaccaggggctgcttgggccttggtgcgcggccagccgggaggaccgggcaaggagccgcgggagagctaggctcgggctcgggcgccggcggtgattgggaggcactgcggcttcttcctctccgcgcccctttgttttgctttgtggttctgagcagctgaacttcccgggaggtggggtcagaggccgcggtgtcagctctcccggggaggcccaggtgacaggtcctagctctctggtgtccccatcctggtgggctgcagtctgtgcccaggcccatgtcctgaccatcgtccccttttgtcaccccccccccacacacacacctacctacccaccccatagtataatacagatctaggggtgcctttctcttacacctctttacggagggcacttgaaagggaaactagaaacatccaaggcatcaaggcctgagattcatgataagctctctgtgcttttaacctctcccagcacctggggtgggtgtggggggtattgtcaactctgacctgccctgggtcatgagaaaatgggaagacaactcaggaagcacccccttcccatgcactggtaggacttttgggacatgttgacctcccttgccttccctcatagctccccgctcaagatggaaatattaataacaatatcaaactagggagctttattccgctgctgctaagtacattacacgctggccacagtccaaggaggaaatagagacgggacagacattcccgttttccagacaggttcatggaggctcagagaggttaagaagcttgcccagggtcacacagccctgggtcacacagagccccaatttgtaacctcctggagtttttccagcttggctcaaaactgttaagcccttcttctgtcccaccctttggcattttgtccccctgacttcagtggacctggttcggaaatgtagataatatttagaagaagcggccagattttttttttccctgggagctggttttgagaaggggtaagatgcacctcgaagttgggctgagggcaggatcatttcacttgtggctggaatggagaattgtctgcaggaactgagaactgaaggtgtgtgaggagtgggggagggggagccccaggcctggccagtgatgggctcggggtacctgggagctggccccactgtcatcttctcccttctctacctgagcgggggacttggccccatttgctgctactcagccctgaagtagagaagagagaagctgaactgtttgggaatgttgatgtctggttgttcctatgccctgtgacccgctgtcgctttgccacaccatggccctttgatgcagctagcggagaactttcttgcctgttctccttggcatgatccactctgtaaccttaggcaggtcatttaactgctggtcctgttttctcatctgcaagtgggggtaattatagttcctttaagtgacctggaggtgggtaaaagtattatccaaacgtgtcattcatatttatcattcagcaggccgggtacgcagtgtgggcacaggggaggaatgtcaactggtggcatttaatttttttttttttttgagacagagtctcgctgtgttgcccaggctggagtgcaatggcctgatcttggttcactgcaacctctgcctcccaggttcaagcgattgtcctgcctcagcgtcccgagtagctgggattacaggcacccaccaccacacctggctaaattttgtatatttagtaaagacgggatttcaccatattggccaggctggtcttgaggtcctgacctcaggtaatctgactggcatttaaatttaaggccaggtgccatggctcacacctgtaaccccaacacttggggagaccgaggctggaggattgcttgagccctggattttaagaccagcctaggcaacacggtgagaccctgtgtctacaaaaaatgaaaaaattagttgggcatggtggcactcacctgtggtcctagctacttgggggtgctgaggtgggaggattgcttgagcctaggagtttgaagctggggtgagccgtgattgtgccactgctctcaagcctgggcaagagtgagaccctgtctcaaaaaaaaaaaataaataaaataaaaaatgtaaaggtgagtggcagaatacctttgccccagaagaattccctgtggtctgggaaggccacctgcaaacgaacaattccccttcagtgacacgcaccctctgagcgctttggggactaggcccctaccccttcagcactttacccatgcggaatacatgcttagctgtaggggctggggggctgagggagaggggctggggggctgacggagaggggctggacccagctcacccagtgtaggaggtaatacaggtgatcttgccattttacagatggggaaactgaggccaggggaagcatgttccacggccgagctgggactccaagccagacggcagagactagtggtgggggttccgtatttgtcaacagaactggggagatggtgcttcatggggtctgatcccaggagctttaagggaccccttatccccgcagccactgtcccctcctttaagtgcagttatttcccttggcgagatgacaggcataagtaataagaattctcgggggaggtgggcaggaggagaggggctgtggggacacccagatctctcaagattgagtgctggctgaatgtaggaactgatctttttggggggctggtgggagaagtccgagtgaggccctagagggtctcccggctgacttccttctcagaggcctgtggcccttccctaaccttccttcaggaggtggggtgtgccccaggctgtggaagggccaggggatcagcacccagaggcctatgaagggggagttcctgggggtgtataaggctccccaggttcccgtgggccaccttgtagcccaggtctagccagcagcccagttcccccgccagctctcaacccccacccgccaggctgccttgactccaggtctcaagaatgcagaaggctgctggtaggggaagttaattggaaacaggaaaacatggcattcctttccaggccgcctgggcttggaaggcagaggggctgccatttcccttctcccgccctgcaggggagaggggtggggagtatggttatcttgccctggtcatatttgagctttcttccccgaccaggcaccctcacttagtagaaacaagagcagtcacccgtgccgtgtccacgatgacaactgctgcctgctcccccagcagaagaattgccccctccttactcaccccttcatatccctctggttttttgtcccctgtcttgtctgagctagctccctggtaggatgcaccttatgccacactagagacgcatggggagcgtttggttgaggggtccccagggagtgtctcctggttccgtccctcgcattctcctctgcctggagtaccaccagtagagttttgtcccagttgactgaagcttttgtgtctcagtgacacgcaagtttccccagtggagagggagagttttctaaggcatttctagtttggtgacaattagttttgtgtatgagtgtatgtattcattggggggagggggaaaggagtgttggcacaagcagagaaggcctttgtttctttaattgttcccaattaaacttcctgagggcctactgtgtgacagggccctggggatcagttaagaccttgggacacagtccaggaggaggagagagaacggttggattagccgctgtggggtttcattcattctgtctgggtggtctgagacatcatctttttctctgtctgccttttgttccttttgttctaagtgatacacacacggggcaaattcagaacactaaagatggtgtctctccctctaacctctccagaatccctggtcccctagctctcttccccagagacagcacctccattctgatgttctgtgcatgtacttttatatatggatgttatgtgtttaaaactattcaggccgggcatggtggctcacgcctgtaatcccagcactttgggaggctgaagtgggcagatcacctgcggtcaggagttcaagaccagcctggccaacatggtgaaaccccatctctcctaaaaatacaaaaatgagctgggcatggtggtgcatggctgtaatcccagctactcaggagcctgaggcaggggaattgcttgaatgcaggaggcggaggttgcggtgagccgagattgcggtagcactgcactccactccagcctgggcgacacagcgagactctgtctaaaacaaacaaacagacaaacaaaaaactattcatcttacacagatggtagtctggtctatgcattgctttttttccacgcttcatctccctgggagaccctaccaatgtaggtcttcctctatctttttcttggctgcatggtattcctctgtgtgggtgaatcctcctttactgttatggacgtggaggtgtttccaaaggtttctgtgtgaagcatgggaaggcatacgtccgcacatgttacagggaaatgagtacgcctgtgggatagactcctggaagtgggattgctagatcaagggccagtgatttgtcttttggtagctcttacggagcacctttgatgttgcacgttgcatctttttttatttttttgagacagaatcttgctgtgtcacccaggctggagtgcagtggcgccatcacttttcactgcagcattatccttcctgggctcaagtgagcctcgcatctcagcctccccagtagctgggactacaggtgcacgccaccacgcccagggagttttaatatttttggtaaagacgaggtctcactgtgttgcccaggctggtcttgaaatcctgttcaagcactcctcccgccttggcctcccaatgtgctgggattacaggcgtgagccaccgtgcccggcccctcatgctgcaccttgaagaaagttgttctctttctctcctcttcaatgtgatcccacctgtcgcccaggcagcatctccaggctgcacgtgtctttgcctcaggtgacctccttgtgtctgatgacctccttgcctcttcctcctgcttatggcctgcgtcatgtgcttgccacctggtgtggaggtcaggagcgtgggctctgggccctgcctgttggttctaatcccagttctgctatttgctggctgaatggctgtggacaggggacttgcttggggccttggttttcccctctattaagtgggttcatatcagtacctacttggtaaggctcttgtgagggtccccaaacacccataaagtgccaaggtagccttgtcagtcagtgtcggtgtcacctgtcattcttaggcagtttatttctcctggggactgtgacccccttaattggcaggtgttggatggaatgctggcttctctgcttaattgcagtgtgaccctgggcaagcaattcctttgcatggcctcagtttccttgtctataaaatgggcccatgatgcctccctcgtagggtctgctgtgaggctgaacgaagcaatgttctgccaagctgggcaggcagtcgctttcaggaactagcaaatgatgctgctgttgttttcactatgattactgttctcctgcgggactcatgctgactcctccgctctgaaaggtccccattgtcttcctgaaaggcacacaaggaacaatgttggcattctaaactgcatggcagcagagggcacgcagcaggctgctccggcatgaggcacacagggcttccctgtaccgtgcctcagtttccccaactggaagagtgggcatgagaggaaacccacctcaggcatgcttagtgttcagcacagtgcctggggtatagcaagcgcccaaaaaatgtgagtggctgtgattggaataattattattaagtagcagagtctcccataggattagatacccaagttgctatggcctttcccccaaaccctaggcaatcagtgttggcattttaaatggaaggcacagggctggcattggtggctcatgcctgtaatcccagcactttgggaggccaaggcaggcggatcacttgaggtcaggagttcgagaccagcctggccaacatggtgaagccctgtctctactaaaaatacaaaaaaattagccaggcgtggtggcgcatgcttgtaatcccagctactcaggaggctgaggcatgagaatcgcttgaaactgggaggcggaggttgcagtgagctgagatcgcacgattgcactccagccagggcgacagagcaagactctgtctcaaaaaaaaaaaaaggaagacaatgcccaaatacccactgggccacaatttcctcttctgtaacagagcttccccgctttgggtgttgtgacgcttcaatgagtgaagacttgggaagctttttaggataggacctggctctcaggaatgctcagtgaagcttcactttgattcttattatcttttatttttattaattttttttttttgagacaagaatctctctctgcgcccaggctggagtacagtggtgtgatcttggctcactgcaacctccgcctcccaggttcaagtgattcttatgtctcagcctcccgagtagctatggctacagatgtgggccacgacacccagctaattttgtatattttgtagagctggtgtttggccatgttggccaggctagtctcgaactcctggactcaagcaatccacccgcctcagcttcccaaagtgctgggattacaaacatgagccaccataccaggcctattatttttaaatattttattttattttatagagacaaggtcttgctatattgctcaggctggtctccaacttctgggctcaacagtcctccgactttggcctcccaaagtcctgggattataggcatgagcaactgcacctggccgtctttgtttattattattttgttttcttttttctttttttttgccatctagactcggcttggcagatttatttattgttattttaacttatattttttatttttttgagacaggctctcactgtgtcacccagactggagtgtagtggcgccatatcggctcactgcaacctccgcctcccaggctccagcagttctcgtgcctcagtctcccgagtagctggaattacaggtgcctgccaccacacacggctaattgttgtatttttagtagagaaggggtttcaccatgttggccaggctggtctcgaactcctgaactcaggtgatctgctcacctaggccccccaaagtgctgggattacaagcatgagctatgcacctggcctttttaactttttgttaaggaaattttaaagcactcaccgagagttgagaaaatagcacaaccacccctgtgtaaccatcaccagcttctgcaaaaattttctgctgatctgatcttttttttttggccattacctactgtgcacatatattttttcttttttgccaaggtattttaaagcaaattccagatatcatatcatttccattgtattattattgttattaatggtggtgttatttctgggatccagaatttgtttcagcacctccagagtctgtcctgttctatgaagaaagtggcattaggcccatttcataggttgggaaactgaggcagcagggagtgggctttgatcaggtggtcctttttctgtgatcccctttttgggactgtggtgaattccctgtcttggccacaccaagcctcaaaccctgtgggttgtttctgattacacaggtttgggggtcacacctgggtgcatgcagtgtggggtacaggttctgttactctgtgcagaaatcgtcctcataaaggaagagttgaagtggggctggcagcaggggatggacccctaggatgaccctggaggtgatgggcaactgggtcagctgtgtgggttaaagtcctgtttctgctccttctaaccctgtgacttggtggcaagctatttccctcctttagtccaggttagagaactggaagtacaggagagataataaatacttatttggatgaccttattgttaaataaggtctagcgtggaaaagatgttttgcaagtgcctggctcagagtaaacggtcactattgttagtgttgttattgcttctgtgtatactcttgaggttggggacaaaaatgctgtttctaggattgcagaggaagggttgatgccccttgaccccccagcccggccccgctaccttcattcccttgccatgcccaccctgtccctctgcactctccctttgaagtgcttgcctgtttagggggctgccaacttcagcgtggcccctctcagcctcttatgtcctctgtgtcccagcctggtaaccttgggaacggagtgagcgggaatatctgtctgaggctgtgagacccttgctaaagacccttggggtccttgagggagcgcctggtggcctctgctgcctggaggcagaggatggcccagtgtccagggacacctgcaggtgaagctccccggagccacctttccagaggctggatgccaactctcgtccaccgtgtgaggctgggcgggcagatgtccacagcgcctgcctcacagggtggctgtgacagttagctggactataacctccatcacctggcacgcatagtgtctcattgacctcagacacttggcgcccggcctgggtgcgggagttctccctgggagaagtctgagctcacagcttagcaagctcttgctgtactgcggaatttctctccctagaacgtgcgcggtgatctcctacttttgtgtgtatacttactctttcgtggacagtgtatatatatatgtatatatacatatatatatacacattttttttcccaaccccttttttttttccttttttttgtgtgtgtgtgtttgagatggggtctcgctgtttcgctctgtcccctaggccggagtgcagtggcactatctcggctcgttgcaacctccgcctcccgggttcaagacattctccctgcctcagccttccgagtagctgggattataggcgcccgccaccacgcccggttagtttttgtatttttagtagagatgaggtttcaccatgttggccaggctggtctcgaactcctgacctcaggtgatctgcctgctttggcttcccgaagtgctgggattacaggtgtgagccactggtcccagcctctcccaatcctttttcattgaagtgtaattcgtatacagtaaaatccgcagaggggccaggcacggtggctcacacctgtaatcccagcactttttgggagggcgaggtgggaggatcacttgaggccgggagtccgagaccagcctaggcaacataataagaccctatctctccaaaaaacaaataaagaccttagccagttgtggtggcccctgcctggatctaatctggaggctgaggtaggagaattgcttgagtccaggaggctgaggctgcagagagccattcattaaaatgcacatagtttaagcatgcctttccatgagtcctaacccctatcaagatacagcacattctcgtcactgccagaaagttgccctttgccccttcctggtcagtacctgctcccagaagcagtcactggcttgccttgtcattgtgggtcagccttgcctcttctagaatttcacagagggggagtcctgccccgtggagtccgttgggttgagcatcttcggctcagcatgatccttttgagatgcagggatgttggtgtgtgtgtatcgggagtgtcttcctttaagaaattctttcccgtgagtatttcttcaagcctggctttctcatgaggctccaaactgcagaagatgagaagggagggctgtgtttcctgtgttctcagctcctggtgtgcagtaggtgctctgtagatgcttgttgaatgaatggatgggtggatgacaggcatgtcccagggatggagaaaggggagcagagaccctgtctttggagttcctgtgtgtttctcaaaaagtgtcccactggccagggcgcagtggctcacacctctaatcccagcactttgggaggtcagggcaggtggatcacctgaggtcgggagtttgagaccagcttgggcaacatggtgaaaccccgtctctacaaaaaaatacaaaaagtagccgagcatggtggtgcatgcttgtagtcccagcaacttgggaagctgagaggtgggaggatcacttgagcccagaaggtcgaggctccagttagctgtgatcataccactgcactttagcttgggcgacagagtgagactgtctcaaaaaaaaaaaaaaaaaaaaaacaagaacaaaacccacatgcttccaaatgaccagggatgcttgtgaaaaatgaccatccctgggctccacacagaccaaactcctgggaatcccgatgagtggcgtccaggaaacagcattttcatcaagcgctgtctctgagtagttcttttgcacaggtagcccagccctaaatcctaggcctcttccggcagcagcagagctccccagcaggcctgtcatccagtcaaggcggccatgggtcttggagccccactcgatctctgtctacggccattgcttgtcctgaccctggctgcctccctggtgcctctgtgtgagcctggagtcctgtactcactccctaagtgctgttcaaagagggaatgaatgggaacctgggaggtaggtcaggattgttgacctccccactgctcagcggggaaaccgaggctccatgagttctggtgtttctcctgcagttcacctgggagtggaagccagacagggtatttcctgggctaagcagccatcagttgtaagatgcagcttccttttcagagacaaaagtgtgaaaaatgcgcatcttggagttgataaaactcaggaaaagtcctgtcccaccctgcagtttgcccgctgtctcaaggctgttttgtgcagggttgtctttttctgttaaatttctgtctcgttagccaaaggaacaaaatcccctgatgtcttcccagtgctttgtaccttctcaagcatgtccccttccatggtcctgcttttgtatttaaaattttttagtcttttttttttttttttttaaatgcgagatggaattttgctcttgttgcccaggctggagtgcaatggtgctatcttggctcactgcaacctccgcctcccaggttcaagcaattctcctgcctcagcctcctgagtagctgggattacgggcacatgccaccacacccggctgatttttgtatttttagtagagagggggtttcaccatgtcaggctggttttgaactcctgacctcagttgatcactggcgtccgcctcccaaagtgctgggattacaggcgtgagccactgcacccggcctgaattgagagacttctttaactcagtttctttttattttcaagatggagccttgctctgtcgcccaggctggagtgcaatagtgcgatcttggctcactgcaacctccacctcccaggttcaagcaattctcctgccttggcttctcaagtagctggtgttacaggcgtgcaccaccacccccagctaatttttgtactttatttttttttttttgagatgaagtctcactctgttgcctaagctggagtgcagtggtgcgattttggcccactgcaacctctacctcccgggttcaagcagttctcctgcctcagcctcccgagtagctgggactacaggcctgcaccaccatgcccagctaatttttgtatttttagtagagacaggtttcactatgttggccaggctggtctcgaactcctcaccttgtgatctgcccgccatggcctcccaaagtgctggaattacaggtgtgagccaccactcccggccatacttttttagtagagatggggtttcgccgccatgttggccaggctagtctcgaactcctgacctcaggtgatcctctcgccttggcctcccagagtgctgggattacaggcatgagccaccacgcctgagtgtaacttggtttctaacaaaagtctgcttaaaaatatgtaggagtgggccgggcgtggtggctcacgcctgtaatcccagcactttgggaggctgaggcgggcagatcacgaggtcaggagatcgagaccatcctggctaatgcggtgaaaccctgtctctactaaaaatacaaaaaattagctggacgtagtggctggcgcctgtagtcccagctactcgggagactgaggcaggagaatggtgtgaacccgggaggcggagcttgcagtgagccgagattgtgccactgcactccagcctgggtgacagagtgagactctgtctcaaaaaaaaaaaaaaaaaaaaaaaatttaggagtgggccgggtgcggtggctcatgcctgtaatcctagcactttgggagcccaaggtgggtggatcacgaggtcaggagttcaagaccagcctgggcaacatggtgaagccccatctctactaaaaatacaaaaattagctgggcatggtggcaggcacctgtaatcctagctactcaggaggctgaggcagagaattgtttgagcccaggaggcggaggttgcaatgagccgagatagtgccactgcactccagcctgggtgacagaacgagaggccatctcaaaaaaaaaaaagtgtgtgtgtgtgtactctcatatattagacattacataatacataatagaaatataaaactatacattattatatataaaaatatatactcctatttataaaattcccttttattttcattcccctccccgtcagcgacctcctgtgctggagtgaattgcttgctttgtgcgatggatttttgctttacagaaaggatactgcttctgtttctcctcctgctgcttttcctcccagtgctgtgtttagagggtcgccttgttggttacctgtccctccctgctgctcctccctgctgtgcgctccatgggctgcaggtagtacagttcacttcaaatcctcatgagggtcagacccccaggtgttcaccatctccctgtcacagaggcacagaggtaaaatgacttcccaaggtcacacagggagctgctgcctgagctgggattttcgtcctcctggttaattcagactcacactcaggcttcctactgcttggactgtggcccatgttctcacctccagcacaaatagccggtgctgtgccttcagggactggggagagcgatgaggcaggaacacacccattcccctgcaaagccagatcagtgtctgaggattgccagctgagcctggggaggtcaggcggggaggcatcagggtaggcttcctggaggagggagcttctagggcaggctttggggcttgggggtagggtaagaaaaacagggaatctagcatgatccaaggtcattgccctgagcagctgggtggaaggaagtgttctttctctctctctcttttttttttttttttgagactgagaccgagtttagttcttgttgcccaggctggagtgcagtggcgcgatcttggctcaccgcaacctctgccttcggcgttcaagagattctcgtgcctcagctccccgagtagctgggattacaggcacgcaccaccgcgcccggctaattttgtgtttttagtagcgtcggggtttctccatgttggccaggctggtcttgaactcccgacctcagatgatccgcccacctctgcctcccaaagtgctgggattacaggcgtgagccaacatgcccggcagattgtgactccctagtgccctcaggtaaaacctcttcagctccgtacaaagtctttctgatctggcctggcttatctcctacccttttcatcttgcctttcactcaccaagctggttcccgcctccccacctcggcctgcactgtactctgcccagagtcatcttcccctgctacaagcataccccagagagcaggcaggttaggttctagacagtgcagtaaagtgagtatcacaatagagcgagccacacacgttttttgattctccagtggatacaaaagttacgtttatacgatactgcaatctgttaagtgtgcaataacatcatgtctaaaaaaaccagtgtacataccttaattaaaaattgctttattgctaaaatatgctgatactgacatgaagtgagcttgtgactgggaaaatgatgcagatagactcactggacaaagggttgccagaaaccttcagttcgtaaaaaaatgctgtgtctttgaagtgtagtaacaagttatgcctgtacctcccactgccacgccctgacttttttttttttctttggaagatagggtctcattctgtcgcccaggctggaatgcagtggtgtgatcatactcactcctgtcttgacctcccaggctcaagcgttcctccaacctcagctacccgagtagttgggaccgcaggcatgtgccaccatacctggctgattttttaagtttttgcagagatgaggtttcactatgttgcccaggctggccttgaactcccgggctcaagtgatcctcctgactcagtctcccacagtgctgggattacagacatgagccactgcacctggctttttttttttttttttttttttttgagacagagtctcactctgttgcccagggtgaagtgcagtgacgtgatctcagctcactgcaacctccacctcctgggttcaagtagttctcctgcctcagcctcctgagtagctgggattacaggcgtgagccaccacgcccagctaatttttgtatttttagtagagatagggtttcaccatgttggccaggctggtctcgaactcctgacctccagtgatttgccctcctcagcctcccaaagtgttgagattacaggtgtgagccaccaacctggccttttttttttttttttaagagacagggtctcactggtgcccaggctggattgcggtggcgtgattgtggttcactgtggcctccaactcttttggggccacatctcgcaggtctctgcttaaatgctccctcctcggggaagccctctttgactttctcgtccaatttccttcacttcactgagcttatttccatgttaggtgacatcctcagggtctgacaaggactgaataaacccctaactgatactgaatgattgaggggccaggtgacctttatacagatcgtgaggagattgggttgggtttggattgggtttttgagtttctgagctgagttggaggcttaggagagaaaaggaaagaaggtgagggaaggttctggaagagcctggaggaggtggtactgggttgggctcagaagtgaagtttgctcacagtttgcgaagtggagagggtgtgaaggcagaggttgtgtgtacaattgggaaagcgttcaggaggccagcatggatgggctgagagacacaggaggagagggaggccgtggggctgtgtgggggccgggggcacggggagctggtagttagggagagctctggcagctgccttgctcgacatggagaggcgccttttgtttcttggcccctgggtcttatgagcaaatggtggttcttaatttggggtaagagggagctccagtccttttaggaatctgcttagaggccacagacttttccccagagaaacacacacttgactctgtatcccaaagtttggcaaaggggttcaggaggggtggggagccagttaagagctgttcacggatcgtgatggcaataaccatgataatcacagccagcacttaccttggctcgccccagcttggttctggtctaggccacttacaagcatcagctccttcactcacagaaggactggaggaggtaggtgcagggagcaccccgattttacacgagtaaactgaggcacagagcgattaagtgacttgcccagagcccgacagctgctaagtggcagagcccccactctcttccctggatggtctgcttcctggatggagcctgtttctgttttgttttgttttggagacagagtgagactctgtctcccaggctggagtgcagtagtgtgatcttggcttgctgcagccccgacctctcgatctcccaggctcaagcaatcttccttcctcagccgcccaagtagctgggactacagtcatgtgccaccatggcccgctaattttttggtttttttttttttttttttagagacagggtcttgccatgttgcccagggtggtcttgaactcctgggctcaggtgatctgcctgccttggcctcccaaagcagtgagattacaggcatgagctaccacgtccagctgcatcctgggttttttttttttttttttttctgagacagagtctcgctcggtcacctaggctggagtgcaatggcgtgatctcagctcactgcaacctccacctcccgggttcaagcaactctcctgcctcagcctctggagcagctgggattacaggcgcccaccaccacacccagctaatttttgtatttttagtagagatggggtttcaccatgtcagtcaggctcgtcttgaactcctgtcctcaagtgatccgcccgtcttggcctcccagagtgctgggattacaggcgtgagccaccgcgcttggtccaccctgggtttttattcatcaagcctcgctgcccccttggtacaggggccaagaccacagctgggaagctcctttcctcttgccccaagagccagcctgggttgctgctgagccattgcaggctgaggcacagcctctctttctccttttacgcttcctgatgtcttctttaacataatcatggccacctcagcttctttcagagagcaatatgttcctgagctagagacatgggtgaccagctggagtcaggatttggggggtgtggtgtaggtctagagccaactgtggcactggaacaaggcccctaccttgttcagcctcagtttccctaatcagctagagaggcctacttcctccttggaggttaaatagatgacattcataggtcaacggaaatgctgcatttatggcaataactgaccttgtaggtgtttcaaaattcaggccgtttcagaccagagtgcacacaggatgatgtgggaccccccagcaaggcaggcagctccccgtcagcacatatgctagcacttctgcgaagatttctgcagcaaatatatctgctgctgttgatactaagagggagatctaaggacagccattgcagttccactttgccccacaatgagccaggaaaaaagaaaaggatggctttagagatttttggaggttggaattgcagattagggggccacagacctaaaatgcctaccgagtaggatgagtgggttttttgtttgtttgttttgttttgttttgttttttgagacagagtcttgctctgttgcccaggctggagtgcagtggcacgatctcggctcactgcaacctccacctcccgggttcaagcgattcttctgcctcagcctcccaagtagctgggattacaggcgcatgccactatgtctggctaatttctgtatttttagtagagacgggatttcttcatgttggccaggctggtctcgaacccctgacctcgtgatccactcatgtcagctcctcgaagtggtgggattacaggtgtgagccaccgcgccgggccagggtgtggggtttaattgggatgatatgttgtggagtgactggcacatgacaacatgacaaggactttgtcattgctggttgctattactattgactgttgttgctattattattactaacccctcttcggtctgtatgggctggtgcagacacattgggctgtgatgcagatccacagttttctagacttgcacaccagttcctgggggatcctgttaccacgtgagttctgagtcagctggtgcagacactttgcatttcttaactcccaggtgaggctgctgtggtcaggggcctgccctctgagtagtaaggtgtccagtggttttccaggtgtttctgagttactttcaaggattctgcaaatggaggggaggcattggatgccagggtcaaaataagattccttagctcttagctttggggtttgccaatttgcagccaggtctgtgttaatcattacatatggaaaaaagtcatataacacgacgaaagtctttgcaccatctcctcttctttccttttccaaaggtgacctctgtggggagtttggggctcatggtctctctctgttgtccaggctggagtgcagtggcatgatcatagttcattgcagtctcaacatcctgggttcaggtgatccttccacctcagcctcctgagtagctggggctacaggcacatgccaccacacccagctaatttttgtatttttttttgtagacacagggttttgccatgttgcccaggctggtctcaaactcctgggctcaagtgatcctcctgcctcggcctcccaaagtactgggattacaggtgtgagccaccgcacctggccttaatcatttttaaatgtgcagttcagtagtgttaaatgtacttttattatgtaacagatctccagagctttttcatcttgcccaactgaaactttatttatttatttttttgagatgcagtctcgctgtgttgcccaggctggagtgcagtggcacaatctcggctcactgcaagctccgcttcccgggttcaaaccattctcctgcctcagcctcccaagtagctgagactacaggtgcccaccaccacgcccggctaattttttttgtgtttttagtagagacggggtttcaccgtgttagccaggatagtctcaatctcctgacctcatgatccacccgcctcggcctcccaaagtgctgggattacaggcgtgagccaccacacccggcgtccaactgaaactttatatgcattcaacaactccccccatccccagtccctagtagcctccattcaactttctgtctctatgaatttgactttaagtgccaaatttaagtggactcctgtagtatttgtcatactgtcactggcttatttcacttattgtattgtcctgaaggcttattcgtggtgtggcatgtgacaggatttctctcctctttaaggttgaataatattccgttgcatgaatagaccacattttgcctatccatttatctgtcgatgaacacatgagttgcttactcctcttggctattgcgaataatgctgctttgaacatgagtgtgcaaatatctattttttttgtgtggttttttttgagacggagtctcgctctgtcgcccaggctggagtacagtggtgcgatctcgactcactgcaacccctgcctcgcaggttcaagtgattcctctgcctcagcttcctgagtagctgggattacaggcacccaccaccatacccagctaatttttgtatttttaatagagatggggtttcgccatgttggccagcgtggtctctaactcctgacctcaggtgatccacccgctgtggcctcttctcaaaatgctgggattacaggcatgagccacggcgcccggccacccattttagctctttttaagtgtataattcagtggcattaagtactttaatattgtgtaactgtcaccattatccattaccagaaccttttcatcattccaaatagaaactctgtacctattaaagagtaactctctatcctcccttccctcagcacctcgttacctctattctactctctatatattggccaattctttttttttttttttttttgagatggagtctcactctgtcgcctaggctggagtgcagtggcgcaatctcggctcactgcaagctccgcctcctgggttcacgccattctcctgcctcagccttctgagtagctgggactataggcgtccgccaccacgcctggctaattttttttgctttttgttttttttttagtagagacggggtttcactttgttagccaggatggtctccatctcctgacctcgtgatctgcccgcttcggcctcccaaagtgctgggattacaggtgtgagccactgcgcccggcctatattggctaattctaggtacctcatgtaaatggaatcatccagtatttgtccttttgtgttgatttcactttacatgtcttcatggttcatccctgttgtagcatgtatcagaattcttttctttttttgtggctaagttcatcttccattggatggatagaccacatttggtttacctattctgccatcgatggacacttgggtcatgtcccctttttgctattgtgaacgacgttgctgtgaacataggctctaagtatctgtttgactttttgccttcagtttgtttgggtttatatctaggagtggaattgctgggttgtatggtaatgatctgttctaacttttggaggagcagtggctacatcatttcacatttccacctgcagtgcacgtggttccagtttctccacatccttgccaacacttgttgtagtcttttattttttttccccacacgaagttttcaaaatctggtgtgtattttacactcacagcacatctcagttgggactcgacatatttcaagtgctcaaatgtcacgtgaagctgctcatagtggaaagcacaagtttagttgatttatgtttttggggttttttttgagacagagtctgactcttttgcccattctggagtgcagtcatcaaggcttactgtaacgttgaactcctgggttcaagcgattctttcacctcagcctcctgatagctgggactacagatgtgcaccaccccatctggctaattttttattttattttatttttttgagactgagtcatactctgtcacccaggctggagtgcagtggcgcaatcttggctcactgcaacctccgcctcctgggttcaagcaatgctcctgcctcagccttctcagtagctgggattacaggcgcacgccaccacacccggctaatttttgtatttttagtaaagacagggtttcaccatattggtcaggctggtctcgaactcctgacctcaggtgatctgccctcctcagcctcccaaagatctgggattataggcatgagccaccacatccagcctaattttaaaaattttttgtagaggcaggaactcactatgttgcccaggttggtctcaaactcctggcctcaagtgatctttttgccttggcctcccaaagttccgggattacagatgtgagccaccgcactcggccgatttatgtttattataattattggtatggctggagggcagtggtatgatcccggctcatggcagcctctgcctcttgggttcaagcaattctcctgactcagcctcccaagtagctgggactacaggtgcacactaccacgcctggctaatttttgtatgcttagtagagacggggtttcgccatattggccaggctggtctcaaagtcgtgacctcaggtgatccacccgcttcaccctcccaaagtgctgggattagaggcatgagctactgcgcccggcctttccctgcttcttttaaatggaatattttagtgttccattttatctccgcttttagcctggtagcgctacctctttattgctctagagtttccattctctgtctttgactaggactttggctttgaatctgagtgagatgggagccatgggagggctttgagctggggagtgacccgacctgacatttttatatccataccttgggttgcttatgcaagagtgtttccaccggccagattcctggaaaaggaattgctgaggcaaaagggagcgagcatttagactttggtggccccgccaagttgcattccagaaaggcttcaccattttcactgctggcaaacagcagccggagcttttgagtggctgttccatgccaggcctgtgccggactctggggaccttggcaggagtcagcctggggctggctgcttcctaattctcagtcctcgagtcctacctccgatctcaagaaaaggtgaggatttcagagaggccataaaaaggagaagcaagagatgattgtgggtggctgaaggcggcctggcacatcccaggtgatgggagagctggctgcatccgatggtcccaccgcagggagcgtgaccaggaggtggagtgtattggactgggaaccgcacgtgtgggctcccatcactgtgtgccatgttggggtgcagttgaggggtcaaataatagtaccgccctcatgggacttgtttgggaggattcagtgagagagcagagagcacacagtcagaacttaaggatccgggttgtcatttgaccaaatgatcagcacggtgggaggggaccaccttcaggcacaggcccacccagcctagggaaaggcgtgactcaagttttggacagtgtttaaggcctgtgtcagaagaacttgggctcggatccccagctgtctccttctcaggcaagttctctgttagacgaggttaaatgacagcagagtctgcctcccgaagtggtgcaagggttcggctcagtgagatgatagcaccaaagagttcagtatccatcctgaaccacagtaagggttgataaagcttagcggctcttattaatattgctgtcattttgttgctgtcattaattttatttgattttatttcttttttttttttttttttttgagacagtctcactctgtcacccaggccggagtgtggtggtgcgatctcagctcactgcaacctccacctctaaaattcaagcagttttcctgcctcagcctccaagtagctgggattataggtgcccgccaccacgcccgactaatttttttatttttagtagagacggggtttcaccatgttggtcaggctggtcttgagctcctgacctcaagtgatccgcctgccttggcctcccaaagtgctgggatcacagacctaagccacaatgccccggcgtatttttccaagatgggatctccctatgttttccaggctggtcttgaactctgggctccagtattcctcccctcagcctcccaaagtactgtaattacagacgtgagccacctttcctggccagtcattattttaaatttaaggcctaataggcaacagccagacccttagtcttcctctaggactaaagccccagaggtgtggggcagttgctcagggtcaggaaataatagagtagagatgggaagccaggttcctctgacccagggtttccccatttctggagagcttccaggtttagggagcaaagtctcttctcctgttataatggacagtgaacaagacatgatatgaaaacaccaccaatggtattaatcatgctaatggtacctcacctgtagtgagtcatcgggtgacaagccctgacctgaagccaggctatttataacccgtctttattgagctccatctgaatattcatatgtttagctcagaaatattaagaatggattgctgggtgtctcagaacccgccgaggggcgttctgtgcgttcaccctgtccccctccaaagcctgaaaaacccctcatttcagaacacgtctcactccagaggtttccactaaaagatcgtggagccatgtgaatgtaaattccgtttccccctcttcatacatcccaggctgcatactgcacacaccgtttggcatctcccagccttgtgttttattgtatttaccactcagctctccagtccttgccagacgagtgagaatgagcagtggcgtcaggccttgacgggctctgcagggtgggcgggaggagtgggcagtgcggcttctggaacccattctctgaaggctcagagcctggagcccagagcgaggccatggctgggatgagggaggaagggggaaagacatcatggactaactcgggcctgccctcgacatgggatctgccttgtgggaccaggaggaggccatgttggctgtgcccactttggtgggaaccaggaaggaggccgagccttgaaagtggccaggtagaggaaggaattcagaaagagtgcgccagaaggggtttcactcactttctctcccccttgatcactggcacgctgtctgcagcctgtaccactttgcgaaactcactaggttgtcgagagacacctcagacttaatgtgttcaataccatgctcctgatacggttctcctccccaggaagaaacccataaaaaccaaaacaaacaaagcctgcttctctccatctcagtaaacggcaccatctcagtaaatggcagctccgagctcccacccacctgggccagatactttggtgccatcctcaactctcttctctctcttaaaattaaatttttttttttttttttttttttggagacagagtctcgctctgtcacccaggctggagtgcagtggcgcgatctcggctcactgcaagctctgcttcccgggtttacgccattctcctccctcagcctcctgagtagctgggactgcaggcacccgccaccatgcctggttaattttttgtatttttagtagagatggggtttcactgtgttagccaagatggtctcgatctcctgacctcgttatccgcccgccttggcctcccaaagtgctgggattacaggcgtgagccaccgctcctggccacatacgtaaagcttttagaataatgcctgatacatcaaaagcaacataaatgttagctgctgttattataattttattgtggtacaatatacataacataaaattgaaccatttttaagtatacagtttggtggcactaagtaccttcataatgttgtacaatcatcactactgtccatttctaggattttttttttttttttgagaccgggtctggctctgtcgcccaggctggagtgcagtggctggatcttggctcactgcaacctccgcctcctgggctcaagtgatcctcccacctcactctatcaagtaggcgggactacaggagcgtgccaccacatgtggctaattttttttttttactttttgtagagacagggtctcactatgttgcccaggctggtcttgaactcctgggctcaagctatccacctgccttggcctcccaaagtgctgggattgcaggcatgagccactgcacctgtttctatttctaggatttttttcaaacagaagctcgatacctgttgaacaataactctccattctccctggcccccagcccctgcaaaactcttctgctttctgtctcattgaattccctactctaggcacctcatctaagtggaatcatgtgatatttgtccctttgtgtctggtttattttatttaacacagtaaaggctcatacatgctatagcacatatcagaattcatccctttctaaggctgggtaatactccattgtgcagatataccacagtttgtttacccacttttctgctgaaatggataaacttggattgtttccaccttttaactacaagttgagcatcccctaatctaaaaatccaaaatgccccaaaatctgaaactttttgatcaccagcatgaagcctttgctttctgatggttcagtgtacacaaactttttcatgcgcaaaattattaaaattattttataacattaccttcagactatgtgtataaagtgtatatgaaacataaatgaattttatgtttatactcagttcccatccccaagacagctcattatgtatatgcaaatatttcaaaactcctacaaaatctgaaacctggagcacttctggtcccaattatttcaggttaagggatgctcaacctgtattattattttgagacagagcgttgctctgttgcccagtctggagtgcagtggtataatcatagctcactgcatccttgacctcctgggctcaagtgatccttcctcctcagcctcctgaggatctgggactacaggcatgtgccaccatgcccagctaatctttaaaatttttctgtagatttgggatcttgctttgttgcccaggttggtctccaactcttgagctcaagtgatcctcctgcctgggcctcccaaggtggtactgggattacagatgtgagctactgcgcccagcctgtattattaatattattgagatggagtctctgtcacccaggctggagttcagtggtgtgatctcagctcagtgcaacctctgcctctcaggttccagcgattctcctgcctccaccacctgagtggctaggattataggcgtgcaccaccacacccagctaatttttctatttttagtagagatggtatttcaccatgttggccaggctggacttgaattcctgacctcaggtgatcctccgatcttggcctcccaaagtgctgggattacaggcatgagccactgcacccagcctgtattactgtatttaatatgcaacctggcttctgaatttctccctgtaacctcacttcccactgagtcctcttcgttcactcacttcagccacaccaacctcttccttcaaggcaggcatgagtcttaccccagggcctttgaacttgttgttctcctgctgtggggccctccttcccctccttagtcaagcctgctcttatcaccctgtttaaaattgcaactcccttgcgcgtctctctcactgcttattcttcatagcacttcatttttgacatgccatctattttacattgattttattttattttattttatttatttatttttgggagggagtctcgctctgtcacccaggctggagtgcagtggtgcaatctcggctcactgaaagcttcacctcccgggttcacgccatcctcctgcctcagcctcccaagcagctgggactacaggcgcccgccaccacacccggctaattttttgtatttttagtagagacagggtttcaccatgttagccaggatggtctcagtctcttgaccttgtgatccacccacctcagcctcccaaagtgctgggaatacaggcgtgagccactgcgcccagcctgtttttattttttgagacagagtcttgctctgttgctcaggctggagtgcattggtgcaatctcagctcactacaacctctgcctgctgggttcaagtgattctcctgccttgttgagacacataattcacatatcataaaatccagccatgtaaagggtacaatgcagtggtttttagtatctccacagagttgtgcaacggtcatctctgtctagtttgagaacattttttctcaccctaaaaggaaacctcatacccactacgaagccactccccatcccctgctcctcccagccccagcagcctttatttcgcttcctgtctccatggatttgcctgttgtgggtaattcacataaacatgatcgtacactagccgatctttttgtgtctggtgtctttctctctgcgtcatgttttccaggtccaccgctgctgcggcgatgcctcattcctttttatggctgaataatattccactggatggatggaccggattttgttgatccattcatccgtggatggacattgggtccattcccctttggctattacagaagctgcttggtggctgtttctttagccaggtggaaggtggcatttccagcccctctctgcccggggctgctcttccactgtgctctctcggcacccacgggtctctgcctccctcctccctctattcctctcttccctcctcctcctgctctttctttgtgtatctccccctcccccagcctcagccaagagagagtgagtctggaagtaatttccagggagcccggggtaggccctgaggcagctctgctcccccctcagggaggcctcagcctgccctgaacactggccccaggggagggacagaagggacagcctgctgcttcttcagctcccgggaaggcatagggagagggccaagcctgggaaacagcttttctctgggctttaaaaattgtgtgcatttatttgatttttttggaatagggaacacatgctcaagtataaaactcagatggtaccaaggatttctagtgacaagtctcctccctcccccaactcccagccacctatacccacgtcctcttcccagaggcaacatggttaggatttttgggcctcctttcaaagagatgttctgtgcatgtgtaagcatctctgtcactcgctctctctgtttctctctctctctctgtcacacacacacacacacacacactttttaaggcaggtttgttttgttttgttttgtttttgagacggagtctcgctctgttgcccaggctggagtgcagtggtgcaatctcggctcactgcaacccccactccctggttcaagtgattctcctgcctcagcctcccaagtagctgggattacaggtggccgccaccatgcccggctagtatttgtattttcagtagaaacggggtttcaccatgttggccaggctggtctcgaactcctgatctcaagtgacttgcttgccctggcctcccaaagttctggtattataggctggagccaccatgccctgccaacagcaggttacattaataccattctggcctttgtttttccttttcaaaaatgttttaatgtttttgagacagggtctcgctctgtttcccagactggagtgcagtggtgtgatcacagctcactacaacctccacctcctgggctcaagtgatcctcccatctcagcctcctgagtagctgggactacaggtgtgcagcaccatacctgactaattttttttcatattttttgtagagatgaggtttcatcatgttgcccaggctggccttgaactcctgacctcaagcagtccacccctctctgcctcccaaagtgctgcgattataagtgtgagccatgatgccttgcaccccaccctgcatttttttttttttttttttttttttgagacagagtctcgctctgtctcccaggctggagtccagtggtgcgatcttggcttactgcaagctccacctcccgggttgacaccattcttctgcctcagcctcccgagtagctgggactacaggcgcccgctactacacaccaggctaattttttagtatttttagtagagacggggtttcaccgtgttagctaggatggtctcgatctcctgacctcgtgatcgcccgtcttggcctcccaaagtgctgggattacaggcgtgagccaccgcggccagccaattttttttttttttttttttttttttaagagacagggtttctctgtgtcgccctggttggagtacagtgtggcaccatcatgactcattgcaaccttgacctcctgggctcaaggaatcctcctgccttcagtctcctaagtcactgggactacaggtgtgcaccaccacgcccacctaatttaaaattttttttgtagagatggggtctagctatgatgcccaggctggtctcaaattcctggtctcaggcaaccctcccacctgggcctcccaaagtgttgagattacaggcgtgagccaccatgcccagcctgctgttctttctaacaacatatcaagaggctcttatttaccaggctcagcctctttcacagtggcatggtattccactggaaggccctaacctcttgggccagtcctgctttgccggacacctaggttagcttcactctgtcataaggctacattattgagcatctctgtgattcacatccaaaaatgagagtaacatttatccctttgttaacttatttgacagtaatttactgagctcctattgtattgtatacctggcagttttgggagtggggatgtgacatgaacaagtcaaagatccctggctgggcacaatggctcacgcctgtcatcccagcacattgggaggctgaggcaggcagatcacttgaggacaggagttcgagaccggcctggccaatgtggcaaaaatctctctactaaaaatagaaaaatcagccaggcatgatggtgtgtgcctgtaatcccagctactcgggaggctgaggcaggagaatcacttgaacctgggaggcggaggttgcagtgagccgagatcatgccactgcactccagtctgggagacagagtgagactgtctcaaaagaaaaaaaaaaaaaaaaaatccctgcctctggggagctgacctgccagtggaggatactcaaagttgggctcatcagactgtactgagtgctgtggaagaaaacagagggaatgggggcagagagggctggcggtgtgggtggtcattgtaaccggcccttgctgaaaaggtgacatttgaacaaagacctgaaggaggcgagggagcaagccccatcagtgtgaagccctgtcagggttcctagctgcaagaacagcaggtgcaaaggtcctgaggcagggatttgaaaacacttacccagtggcacagccagtaagtggtggagctggggtttgaactgggtagtctggagtcagagtcagattttttttttttttttttttttgagacagagtctcactctgtcacccaggctggagtgcagtgacatgatcttggctcactgcaacatccgcctcccgggttcaagcgattctcctacctcagcctcctgagtaagctgggactacaggcacccaccaccaccatgcctggctaatttttttttttttttttttttttgtatttttagtacagaccgggtttcactgtgttagccaggatggtctcggtctcctgaccttgtgatctgcctgcctcggcctcccaaagttctgggattacagacatcagccaccgcacctggccagttttttttagtaaactttacttaggtataatttatgtacagtgtgacacacccatttaaaaagtatcattggatgcaatttgataaatgtgtaccattattaaccatcatcacgatcaggatacagaatgtttctgttaccccaaaaggatcaataatgcccttttgtaatcaatcctccctaccccctggctcaggcaatgcaaaaatctctgctttctgtaactatagattcaacttgtgttttctaatcagcacattcagggagtgtgtgatgcctccagcttttttcttagaatctcacctgtggtcctagctacttgggaggctgagacgggacagtcgcttgagcccagcagttggagctatgatcatgccactgcactccagcctgggtgacagaccgacaccccatttcaaaaaatataaaataaaataaaaattcagctattcagggcagggtcttttgtggtttcataggaattttaggatttttttctattcctgtgaacaatgccattggaattttgatagtgattacattgaatctatagaccaatttgagtaatatatatatattttttccttgcaatattaagtattccaatccatgaacatgggatatctttccatttatttgtgtcttctgtaatttcttgcatccatgtatcatagttgtcagtgttcagatctttcacttccttggttaaatttaatttaatctttttgatggtattgtaaatgcgattgtttcttaagtccttttttggttaggttcgttgttagtgtgtagaaacaccactgatttttccatgttgattttgcaactttctgcaatttcaatttgtctgttctagagtttgacataaatagaatcacacagcatgtactcttttgtatcaggcttctgttgctcagcatagtgattttgaaattcatctatgttatgtgtaccagtagttcattccttcttttgctggcaatatgccattatgcagatataattttttcatccattcacctgctgatggacctttgggttatttccagtgtttggctgccatagatgatgctgcttgaacatgcctgtacgagtctttgtgtggacctatgctatcatttctcttgggcaaatacctagaagtggattagtagggtcagatgataagggtatgtttaattttgttagaaactgcccacctgggcgcagtggctcacacctgtagtcccagcactttgggagactgaggcgagaggactgcttgtgcccaggagtttgagatcagcctgggaacatggcaaaacccagtctctaccaaaaatacaaaaaaattagccaagcatggtggcacgcgcctgtagtcccagctactcgggaagctgaggcaggaggacctcttgagccctggaggtggaggttgcagtgagccaagatcatgctactgcactccagcctgggtgacaaagtgagaccctgtctcaaaaagaaaagaaaaaagaaaaagaaaaaagaaagaaagtgccaaatatttttcaaagcagttgtttaccaccagcaatggataagcattccagttgccccacatcttccccaccacttaccattatcagtctttataatgtcagacgttctaacgggtatgtagtaatatctcattatggttgtagttttaatttccctgatgactaaagatgttgaacattgcattgatttatgggctgtttgcataccttcttttgctcattttaaattggatcatttgttgtctcttttgagacggagtctcgctccaggctggagtgcagtggtgcaatcttggctcactgcaacctctgcctcctgggttcaagtgattctcctgcctcagccttctgagtagctgagattacaggcgccctccaccatgcccggctaatttttgtattttttgtaaagacaaggtttcgccatgttggccgagctggtcttgaactcctgacctcaagtgatctgcccacctcagccttccaaagtgctgggattacaggcatgaaccactgtgcctggtctggaattcttttaaacagccctttttctggatgctaaaaattgacctacaaaagtaactctgtaaccaacccaaatacatctggggccccggtgtgctgcccctgactgacaaagtgaaggctttgaatgtggctctttctgcatcctagcggctcagtccaggccctggaggggcatctgtcacctgggacactggcagcatccctggcatccagccatgaccatcccttctcacggcggggctgctcacggtgctgtccctggggtccctggcattaggctgtgatgaggtactggggacaccagcctcccactgggtggctgtggacagaagagctcagcagaagccacactgtctgactttgagcagcctgtaggttagctgagaaaacaaggcatacattttcatggttttgcttttctcgtggtggccctaacagttaacatcggttgtttgccatatcgggctctggactcacgaaatcctgaaatggccccggaagcatgggcaatgctgagaatatttaagcgtccagagccccaccagaacccaggctggctgcgagactaccacatgcgtgttcagctggaacaccactgacctgggggggttaattctgttccgatgtccattttgtagacctagaaactgaggaacagagagggaagtaacttgcttcaggttgcacagccaggaggcacagagcatgatatagagagacctttacctacattcaccaaccttttatttatttctttattttttgagacagagtcttgctctcttgcccaggctggagtgcagtggggggatcatggctcactgcagcctctacctgctgggctcaagggatccttccacctcagtctcccaagtggctaggactacaggtgtgcccatgatgcccagctaattatttcttcttctttttttttttgcagagacttaggtgcccaggttggtctcaaactcttagcccttagcctcaagtgattctcctgcctcaggctcccacggtgttgggattacaggtgtgagccactgcacctggcccagattcaccaacttttaatattttgccacatttcctttcttttattttctttgcttttccttttcttttctttctttctctctctccttccttgcttcctccctccctcccttcctccctccctccctccttcccctcccctttccctaccccttccccttcccctaccccttcaccttccttttttttctttctgatggaatctcactctgtcactcaggctggagtgcagtggcacactctcagctcactgcaacctctgcctcttgggttcaagcaaccctcctgcctcagcctccagagcagctgggattacaggcgcccgccactatgcccagataagttttgtatttttagtagagatgaggttttgctatgttggccaggctggtctcaaactcctggcctcaagtgatccgcctgccttggcctcccaaagtgctgggattccaggcgtgagccaccgcgcccggatttcattccatatgcttttatttctacaggccagtagagcaaaaggttttctgtctgcaggtctcagtttactcttaaggaaaatgaaccagtttcacctgaactctacacacacacacttcctctttctctctctgtcctgtgtttctcctaaacgatttgagagtaggaatgacacgaacgtgcatttccaaagaaccattctcttatgtaaccacaggacagttatcaaatgcaccttgttgaacattgattgatacaacaccattaatgcagccactctccgtattctggctctgtcagttctactaacgtccctcagagccgtatcctccccaccccgatgtaggatgaggtttggaatcacgccagttgcatttacttgtctggtctctttcagtcccttcattctggagggtttcctcagcctttctttgtgtttcatgacgttgacattttagaagggtccaggccagttattgtgtagaacgtctctcattttcagtttgttggatgtttcctctcagtgagatccaggctacgcatcgctggttggaatttccagagcctgtgttcttaaccaccctgaggttctgcctttgaaagggacattctggttcctttccaaagggctggtcatcatcttgtccttgttctggcaggtggtgcgttcagctggacaacccgctgcattcataatattggggtcatataatttcaagaaaaggttaaagaaaaatggtctcttaacatgaaaaggtcatagaggatcattagaaggagcaaaagaggaaaggggagggagcaaaaaagaaactggaatatacaaagttccaaaaacgcagataacacaaaagtagcttgtaatcctgtcactcctggggtagagcaagtatgttaatgtttgggcatatttccttctgatcttccttctgattggctcttcctcttgccctcaggcattcagtttgcacagttgacaggagagacatattttgagagctgaagactgagattccaggtgcagtggctcacgcctgtaatcccagcactttgggaggctgaggcaggcagattgcttgaggccaggagttcaagaccagcctgagcaacagagtgagaccccgcctctacaaaaaattaaaaaagttagccaggcgtggtggcatgcgcctgtaggcccagctatactggaggccaaagcaggaggatctcttgagcccaggaagttgaggctgcagtgagccatgattgtgccactgcactgtagcctggttgacagagtgagaccctgtctccaaaaaaagaaaaacgtagaaagaaaaaagaaaactcagggcaggggggcgtcagccagggaggtgcattttgggatctggcagggggtggaggaggggtacgtccagcatgcggaatgctctgcccactgagggcttgtgtccccagacctgggatttctgcctcacagtgtggacaccagggtcctcaggggagcagagatgggtccctgctggaaacttccctatgtctccagagcgcctgcaaaaatctccagaaatcgccagcccctcgtgagtttggagtggaggcttttaatcaagtccaagggatcagctcagcccgacacacatgcacacagacacacgtgtgcgcgcacacacacacggctgaaacaccatgcttaagaacatttctcccatgtgttttactttttgagccttagcccggggatttgagaataacagctattcctgagagtacttcccgagcacatcctgggagctcaggtcacgcacttcacccgtattaattcgtttaatcctcctgacagtcccttgaaggtgagactgttactatcagaaatggaaattgagacacagcgaggtgaagtaagtcaaggattcctacagaaaagtgtaaaatatgctcatttcatccagcaattataaagtaacactctcacacacagttattccttttttttaacagctttattgagatataattcacataccatacagttcacccatgtaaatcgttcaccacagtttatagtgtgtttgcagagttataaccatcaccataatctattatagaacattttcctcacctcaaaaagaaactctgcatcccttagccatcatccccactccttctccccctcccagcctccagcaaccacaagtctactttctggctctgtgaatttgcctattttggacatttcgtggaaacagactcttacacgacgtggccttttgtgcctggcttctttcactcagcgtgatgttgtcaaggtccctccgtgtgtgtcagtgtctcatcccttttcatggctcagtaatactccattgtatggataggccacattttgtttatccgttcagttggtggacattggaggttttttttttccagtttgcactgttctgaatgatgccgtatgaatgtttgtgtgcaggcttttgtgtggacacttgtttccatttctcctggtttctacatgggagtggaattggtgggtcacagggtaactgtgtgttaacctactgagaccagccagactcttccacggcagcggcacccttgtatatcgcccagcaatgcatgagggctctgatttctctatcattttgatgattcatccattgtcctgttgataggatctgggttgtttcagtttaggggtgctatgaacattctagaatgtgttttgcggtccacctctgccccgctatgcataaagttgggattccatagacagtaggtcctgttaggtaacaggaaaaatgatctgtgggctcctctctctccttggcacgtgtgtgtggcccacgttgcatgttcttgtagaatcctccttcccgggtgaggattggaagccatgatcgcctgcctctgttgctggttttagtctttaacccttgctctgtggacttgagaaatgtgcttttccatggtgcctgtgaccaagatgtccgcatcgttagtgaagaccctgctatgtccttgaccacactgcacggggatcctgtccacgatggggggtgtcctgttgggcttgagtgtctagatatggagaccgtagttcgcggggggagtggggggccgtttggcatatttgccctggcatttggggttgtttattgggggtgggagtgctcctggcatttcctgggcgggaactactggtgtagacctactggattaacttgctcctgggtcggtgtgcgggatagggggagggtgcatcagtctttgtggagcgtctgccttctctccgtctccctgttttcctgttaccgtctccccgtccctctctctgtctctctgaactgctcgttccctccttgccttctgtgccgatgcccagttgaactgcccatccctatagattgggcgtctctgagcccgcagtggctgcctgagctgtaacccaccccgtgccctttcacctcctctcccgcctccagctgaccaatccctggggtttctggtcggcctgtggatgtgtcccggtcaggcctaggtcaggcgcctgacagcgtcacctgtggccactgagaatcatcctccttcaggagtcccagtcagtcaatatttacacaaagcgaacaaaaagaaacctggagctcaccactcttgggggagccaggcaggagctaagataagtcccatttatggcctgtcagatagcgatcggcacctgcagtaaagcaagcaggagagggactgggggagggcttgtgactacagacggccctggtgacactcgagaaaaggaagggcatggctgggagtggtgactcatgcctgtaatcccagcactttgggaggctgaggtggtggatcacctgaggtcaggagttttttttttttgtttgtttttttttttttgagacagagtcttgctctgccacccaggctggagtgtagtaggctgatcttggctcactgcagcctctgcctcctgagttcaagtgagccctgggctctcctccctcagccccctgagtagctgggactacaggcgtgcaccaccacgctgggctatttttttttttttttttgaggcggagtctcactttgtttcccaggctggagtgcagtggcacgatcttggctcactgcaagctccgcctcctgggctcacgccattctcctgcctcagcctcacaagtagctgggactacaggcacccaccaccacacctggctaattttttgtatttttagtacagacggggtttcaccatgttagctatgatggtctcaatctcctgaccttgtgatctgcctgcctcggcatcccaaagtgctgggattacaggcgtgagccactgcacccggcctaatttttgtatttttagtagaaatggggattctccatgttggccaggctggtctcaagctcctgacctcaagtgatccacctgccttggcctcccaaaggctcggattacaggcatgagccactgtgcctggcctgtatgttattaatattattgttaatcttttcatttatttgtgagcgctgttatatgccctctgtatcttttgtgaggattaatttagttaaaagttgatctcataatatataagtcaacacaatcagaaattcaaacaggaacgtattgacaagcaaaggaatgttactgtctctgcctcgaagatcttgtgtcctgcctggagacacttcacttccccactcacctgccactgtctgctcagtgtcaatgtattgattacctgtccaacagaatctattttatctctgaggttagggaattagtagaaattgatatcctactaatggaatagaacagagagtccagaaggagaaccaggcacattaagacatggtatgaggtcgatatggccaatggtcagatttgtggggaaacaagggactcataataaatagaggtagggatcaaaagtaaaaaggtcatccacaggtggaaggagatgaaatcagatccctacctcacactgtacagcaaagccaaccccaagattattgagtactcaaagtcaaatataaacttggaagctgcttagactttggggtagggacagattctgaaatgagatttaggttagtgtaaaagtaattagattttttgccattaagtgcaaaagtaattgcagtttttgccattactttttttttttgagacagagtctctgtcgcccgaactggagtacagtggcacaatatcagctcactgccacctccacctccagggctcaaatgattatcctgcctcagcttcctgagtagctgggatttacaggtgcatgccaccatgcctggctaatttttttgtttgtttgtttgtttgttttttgaggtggagtcttgctctgtcacctaggatggagtgcagtggtgcaatctcggctcactgcaaccctccaccacccagggtcaagtgattttcctgcctcagccttccgagtagctgggattacaggcacctgccaccaccccggctaattttttgtatttttcatagagacagggtttcactatgttggccagactagtctcaaactcccgacctcgtgatcctcccgccttggcctcccaaattacagggctgagccacggcacctggccaatttttgtattcttagtagagacaggatttcaccatgttgactaggctggtctcgaactcctgacctcaagtgattctcccaccttggcttcccaaagtgctgggattagaggtgtgagccactgtgcccggccagtttttgccattacttttaatggcaaaaggtgcaatgatttttgcaccaacccaatataaaaggtgttgctctgagagggaggtgtggagttcttgcccatagctgccacttcagtatttctccttctctgaggctctgggcagccctccctgctgtgccctggattggggtcatctcttctcttaataaggtgatcagtagctttgggaccagcagaatgcattagagggaaatgggcttcactgaagagggcagtggatgagaggaaggagcatgtgtgagggcttgtgtgcaccacacatcctgacaccatccgcccagcccgcacagcctgacaccatctgcccggtccacccatcttgacaccatctgcctggcccacccggccttctcaaatgctggagggctcttggctctgctgttcccttacactccttggccaatccatctgcaaaccctcttgctctgctattatgtccagaatttgactgcgccttgtcccctccgctgtcaccatgtctcctgcctggaccattaccgtcgccccctctctgtgcttccgtcctcaccttctgcagtccgttctccactctacagccagaaggaacctgtgaacacccaagtcaggtcatgtccctgccctgtccggagccctccctcagccctgggctcacctggaataaaagctgaagtcctcgccctcgttgtctgtctgacctcgcctctcctgcatgcctactcatgctcacgccctcatcactgcccgtggtccctgaggcgcccacgtgattctgcctcaggaccattgcatgtcctcctccttctgcctggagcccgctctcctggggtggccacattgctgctccccttacctcctgcacatcctgtatgtaccccagccctccccaacccattcttggcatccttgccctcatcttctcctcgggacgctgtctcttggttcagggtctgactcctgccggtagaacgtgagctctgggagagcagggatgacttcctcactcccagcaccatcgggaaagcgtttgacttctctttgtggagcagtagggatcagtagggagccctaagaaggggaacagcacgatcttaaataaaataggtcgctctggccaccaagtggggaactgagtttagaagtgggaggtcagttagaagtccctgccaccctccaggcaacgagcacgagagggttgggcagacaatgctggttccaagacctagagaagggtgggctggagttatttaagagacaggaggaatggtggcatctttgagccaaccagcgttggctgattcccacagatggcgccactcctggctgtgatgtggctgcaaacccacggcttgcccgggacctgctctgggacaggaacgtttgaaccgcaccaggtcagcatctgaaggtgtttgctgtaagacccaggcctgtgactctgccagcccaaacccctgccaggtcctgggcagatgtcggcctgctgtcacttctctggactctaaggcttttttgcctgtgtggcatgtgagaaaaataggggagtgattaggaaggctcatgcagaatccaggtaaaaaactatttcaggtatggaagggtggaggggaggaaggtcatctggagtattttttttgagacaaggtcacccaggctggagtgcaatcgtgtgaccatggctcactgcagcctcgacctcccaggctcaagcaatcctcctacctcagcctcctgagtagttgcaatcagaggcatgtgccaccacacccagctatttttttaaaaaattttttagagaacagggtctcactatgctgcccaggctggtctcaaactcctgggcccaagtgatcctgctctcttggctcccaaagtgctgggattacaggtgtgagccactgtgcccggcctgtccagactctgtatagacatcagcagtcaggcagtgtggcatcttggaaagcagccaaggctttggtgtccaagaatcccaggttctaatctcattgcttcctcttactactcgtggctttttagcttgtgtgcattcggctgcaagtaacagttgacttgaccactgatggcttaaatactctcttatttttttcaacaaatatttctaaatttagtttttgagatggctaattcaccaagctgaaaaagcaaaaattattttgaaaactatgcagtggaacacctcctattcctgttccgatctgccaggtcccttcatagttagtcattgtgtttagtgtcatatacacccttcctgaagttctttaggcattgaaaagcattcagaatatgtatcatgtctccttcacccttttcttaagcagatggtaacgttttacacacacccttctacattttacttttccatgtagcagtagtctgggcgatctttccctatcagtacacaaagaacgtcctcattctttttttttttttttttttttttccgagacagggtctcgcgccgtccgccaggctggagtgcagtgttatgttctcagctcactgcaacctccaccttcactggctcaagcgatcctccgacctcagactccagagtagctgggattacaggtgctcaccaccacacctggctaatttttgtattttagtagagatggggtttcatcatgttggccaggctggtctcaaactcctgacctcaagtgatccgcctgcctcggcctcccaaagtgctgggattataggcatgagccactgtgcctggcctcattctatttttttttttttcaaggacatctttactgacatattcacataccataaaatccacccatctaaagtgtaccaattcagttgttttcagtatattcacagagttgtgcagacatcaccacaatccattttagaacattttcatcatctcaaaaagaagccgtactcatgagcagccgctttgaatttctccctccccgcagtccttagcaaccacgcatctactttcggtctctctgggtttgcctattctggacattttgcataaatggaatcatggaatatatggcctttgtgcctggctcccttcacttggtgtcatgcgttccaggttcatgcatgttggagcgtgtgccagtgttccttccttcttatggcggagtaatagtctgtgatatggatacaccacatctgtttatccgttcatccacggacgggcatttgggttctaccttttgcttcttgcaagtaaaggtgctgcggatgttcacaggccagcctttgttttgttttgtttttttgaaactgagtttcgctcttgttgcccaggctggagtgcagtggcgcaatctcagctcactgcaacctgtgcctcccaggttcaagtgactctcctgcctcaggctcccgagtagctggtattacaagcgtgagccaccgcacccagccttgggccagtttttgtgtggacatatgttttcgactctcttgggtctataagtaggagtggaattgctgggccacgtggcaactctatgtttaacttttggaggaactgccaggcgggtttccacagcagctgcaaccttttacagtcctaccgacagtgagtgagcattcgtgttccgccacaccctcacgaacacttgcccttgtctgtctctttgatttgagctatcctaatggatgcgaaatggtatcctctggttctgatgtgcacttccctggtggctaatgatgttgagtatcttgtcatggccatttgtatacctctttcttttttgtacagctgcatactattcccctgtttagagaaactgtagttgatttaacctgtttactactgcaatagtcctgcccaagaaattaaaaaaaaaaaatcaacctgtttactactgatggccagtgggttgttcccagtatcttgctattattattattattattttttgagacggagtctcgttctgtcacccaggctggagtgcagtggcacgatctcagctcactgcaagctttgcctcctggtttcacgccattctcctgcctcagcctcccgagtagctgggactaaagacacctgctaccgtcttgctattattaatagaaacataactgtaaggccagggcatggtggcttatgcctgtaatcccagcactttgggaggctgaggtgggaagattacttgagcccaggaattcaagaccagcctgggcaacatagcaagactccatctctatgaaaaaaaaaaaaaaaatcacaaaacaacacacctgtaaaagcccctaactgtataattttggtcgtgtcaatggtacctgcaggatatgttcccataagtgaagtagccaggcagagggtgaatgcgtcttgatcttagtgggtattgtcatgtgcagggggtcctcattattccaagatatcatatttgcagatttcatctaatcgccaacgcttactcataaccccaaaatcaataacgcacaatgcttttcccatcatttatggacactcacagaatagcaaaaaatttgagtcacctggtgcacacatctccagctgcagtcaagcaacgccacaccctgctttcttattctcttactataaacaagtgtcctttttgtggtctagttagtgccatgttttctatatttttgtgctttgtgattttgctgtttaaaatgtccccagtttggccaggcgtggtggctctcacctgtaatcccagcactttgggaggccgaagcaggtggatcacctgagatcaggagttcgagaccagcctggccaacatggtgaaaccctgggtctactaaaaatacaaaattagccgggcgtggtggtgcatgcctttagttccagatacttgggaggtggaggcaggagattcgcttgaacctgggaggtggaggttgcagtgagcaaagatcacaccactgtactccagcctgggcaacaagagcaaaactctgtctcaaaaaaaaaaaaaaaaaaaaaaattagtaaaatgtccccggtttaggacaggtgcagtggctcatgcctgtaatcccagcactttgggaggctgaggcgggtgaatcacctgaggtcaggagttcgagaccagcctggccaacacggtgaaaccccatctctactaaaaatacaaaaaaaatgagctgggcttggtggcgggcacctgtaatcccagctactcgggaggctgaggcaggagaatcccttgaacctgggaggtggaggttgcagtgagccgagatcgctgcactgcactccagtctgggtgacagagcgagactccatctcaaaaaaaaaataaaaataaaaataaaaataaaaacgtccccagtttagtgctgaagtgccgtctaatgtttctaagctcaagaaagctataatgtgaggctgggcatggtagctcacgcctgtaaccccagcactttgggaggccaaggtgggagaatcgcttgaacccaggaggtcgagaccagcctggggaacatggtgagatcctgtctcgacacacacacacacacacacacacacacacacacacacacactctgaataaataagtaaattttagaattagccaagcgtgatggcgcacacctaaggaggaccacatgagcctggaaggtcaaggctgccatgagttcttttcacaccactgcaccccagcctgggcaacagtgagaccctgtctcaaaaaaacaacgagaaggctgtgacgtgcctttcagagaaaatacacgtattagagaaactgcattcaggcacaagttagggtgctgctgacgtgaggctcagtgttaatgaatcaaaactatacattaaataaggtgtcttcgaacagaaacacacataagccaaggttttatattggttggtgaaagcattgtggccagaggctttcaggaacctaactttgtatttcccccaggagacatggttaatgtctaagtatttgctaatccaatgttcacagtcactttttagattctgtaatatatagaacacagccacctggaataacgatcaattgcacaggggttttttttctacatgctaggggtgctttactgggttctaatttatgtgcagtaaaatgcacaaaactgaagcgcgcagcttgatgttttctgacaaatattacctgtgtaagcatcactcagctctagctagagaacacgtccatcatctgagcaggctcccttatagcctttcccagtcattcctgcatccctcccttgaagcggccacacgtctgatatttttcccccactataaatcagttctggatattgtagatttgtttggttttttttttaagatggagtcttgctctgtcgcccaggctggagtgcagtgtggcgatctcggctcactgcaacctccacctcccgggttcaagaaattctcctgcctcagcctcccgagtagctgggactacaggtgcccaccaccacgcccagctaattttttgtatttttagtagagacagggtttcactgtgttagccaggatggtctcgatctcccaacctagtgatctgcctgccttggcctcccaaagtgctgggattacaggcgtgagccactgcgccgggcccatgttctagatctttacacaaatggactcacacagtgtgtagacttttgtgccaggcttcctttgctcagcatgatccatttaagacccatttgtattgttgctgtagaagtccttcattcccttttactgccaaactgtattctgtcgtgtggatgtaacagtgtattcatttacctgttgatggctttctgtgccatttacagttaggggcttttatgaataaggctgctgtgaaatttttttttttttttgagacggagtcttgctctgtcgcccaggctggagtgcagtggcatgatttcggctcactgcaagctccgcctcacaggttcatggcattctcctgcctcagcctcccaagtagctgggactacaggtacccaccaccactcccggctaatattttgtatttttagtaaagacggagtttcactgtgttagccaggatggtctcgatctcctgaccttgtgatccgcccacctcggcctcccaaagtgctgggattacaggcatgagccaccatgcccggctgctgtgaaaatttttgtacaggtgcttttgtggacatacttttcacctcccttgagtaaataccttggcgtgacattgttgggtcatagagttggtatatatttaactttacttaatccaggctttaattctcttctgggacaagatgtctaggagaaggccattccagggatgtttggcagctgaggattgtcaggccagtaggtcagtgtccctcttatactctctctctctcgttttttttttccctgagtctgttttgctagggaacctctgattctcttgaccttcccctcaggaatgcataatggctgctgcggcaccagtcattgtcattatattcatagcagtctttcaagcaaaaaggagagggagcaaacagtcttcccaagacaagattctgcctctttagccaaatgtgaaaactttcccatatccattctgagctgcaagggagtctgaggaagaaagtttctggccaaggagcaggggtctgcactcactatggtctgtcctctgttgaccaggatgttggggctggaagtgtttgtcagaccctgggcaacttctaaattagccttcctgagcctcagagaagactcggtgggaccacttggtcaggggcctggaccttgaccaggaactggtggcttgtgtttgatacaagaacaagaaccccagaaggaaaactaaagagacagaagcttctaggccgggcatggtggctcatgcctgtaatcccaacactttgggaggctgaggtgggcagatgacttgaggtcaggagttcgccaggcgtggtggcgagtgcctataatcccagttactcctgaggctaaggcgggaggattgcttgaaccggggaggcagagtttgcagtgagctgaaatcatgccactgcgctccagcctgggtgacagaatgagacttcgtctcaaaaaaaaaaaaaaaaaaaaaagcagcagcagcttctagaacagtggttcgcagagtgtggtctgtgccagcagcatcagcatcacctgggaactcattagaaatgcagagtctcaggccgcaccgggacctgccgattcccagattctcaaatctgtattaggaaccagtggtctacaaacccgtgcgcacgtcttggggaacgtttgttttcccctttgcttcccttagctgcatttttttcccctgaattcgaagcctgcttcgttgcctgatgacgtgtgagtccctgtgtccggtgaacataatcatttcttttgtatttccgccacccaccccgaatgcctgtactttaccctctcccagggtttttcctgtttctcataagccagcattgagaaaaatccaaacccttttgagatacctggttttcttggcaagactgcagctttatagctgtatttagaacagcgtcgaatggtgaaaagggaaaagagaagatgcataaaacatttctagtttgtaactacctgtataaaataggcttttaagagccagacatcagtcgctttatgagcaatctaagctttatggggcccactttatttggttaaactaattcaatgattttagagatctaaaggtcactaaaaataaagatggtgtagattttaattgctcttcaaattgctctttctctgtctttcccaacaggggtggaggtgggtgaagaatcaacatttttttccctgttttccttttctagctttaaaatagacacatcatgcaagcggctacatatccagggcccagccagctcttacggggctttttcatgcaattgaaaatggtgctttgtccgagagggcatgactctgtggtgtgtcctttgtatgaattgggaaaggggactcctttctccatgtggatgccacccttctctggggctcataggtgtgagcagaacctggactggatttgatgccccacttgcccctttgtctggattcctttgtgcagtgaacaacctgtgcagctgtacatggtggtgcatacacacacacacacacacacacacacacacacacacacacacacacacgttctcttctcttctctctttctttttcttttttgagacagggtctccctctgtcacccaggctgtggtgcagtggcatgatcttggctcaccacagccttagcctcccaggctcaagcaatcctcacacctcagcttcccaagtagctgggaccacaggtgcacactagcatacctggctaatttgtaaaattttttgtagagatggggtctcactgtgttgcccaggctacatatatatcttctatactctgtacgtattgtatgcgtctctgtcttagaaacttacatgtacattagtttcccattgtcgctgtaacaaataccacagatgcaggatcttaaaacagaaaactattctcgtatagttccagaggccctaagtccaaaatgagggtgttagcagggccactggggttgtcagagctgtgctccctcaggaggctctagggaagagcctagagccttcttcgcctggtccagcccccggagctctaggtggtccttggctcgtagccacgtgacattaagctttgcctccttcttcacatggccttctgttcttctgtgacttctcctttgctgttaagaggacatttatcataggattttgagcctacccagataatccaggacagtctcatctcaacattgttaatctaattatgtctacaaagacccttttttccaaataaggatggccacatccacaggttctgggatgtttacatattttttgtggtgggagccaccattcaactcactacaaaggccttggaaatacatcctaagagcttaacttctaggcgtcatagcatgttaagtccacgtaccaggtgaacacatcacctcatttgtctgtctgaccaaggttcacgggaatgactcattcgaggcatttcaggacaactaaagggatagaggacctggccgggtgagtggcagaggtggggaacctgttgtagtacacccctgctgtggggggtggagggagagatggccaggctggcatcatcatgtagttcccacgggcttaggagtctcagctgggttcaaatcctggctcttgggtgaccttgggcaagtacccaaccctttttggcctcagtctcctcatttgtgtaatgggcatgaggataatggcatctgccttatagtgttgctgtgagaatgaaatgataagatgaagcactttgccgggcgtggtggctcacgcctctaatcccagcactttgggaggctgacgcgggcagatcacgaggtcaagagattgagactatcctggctaacacagtgaaaccccgtctctactaaaaatacaaaaacaaaaaattagctgggcgtggttgtggcgcctgtagtgccagctactcaggaggctgaggctggagaatggcgtgaacccgggaggcagaggttgcagtgagctgaaatcacgccactgcacaccagcctgggtgactgagcgagactccgtctcaaaaaaaaaaaaaaaagacgaagtacttagtaagcattcagcaaccttggctggggtgacgaagatgatgaagtcagaggtggccgtagccaagggctcatgggacagaatctgacccatcaaatgcccagactcccaaacaccagggctcatagccacgtggcccaggcagaggttggactcgtagttggggcaggtccagtcggtggccagcgaggaagggggttcgcggggaggagcagaggccagagggagccgggccggggaggagggctttctatggtcgtttacacatggcatctcggtgtccagtgtggggcaggcatataggaggagctgaggctgcttgggcagcatttatttaccaatcggtaggtcagcttttgagtattttaatggcaggagcagccagatgtcaataagccaaatgtgaacccaggcttggtgatgagaaaatacatttactacatttgggccagaatagtggtcatggacaggagggcactgactggagagatatgggaggtgggatggataaaacttggatgagtcagatgtggggtcaaacttggttcctaagtccccagagagagctgtatcagtgagctgtcactacataacacacagccctggctgggcacagtggctcatgtctgtaatcccagcactttgggaggtcaagatgggaggatcgcttgagcccaggcatttgagacctgcctgggcaacatagtgggaccccgtctctgcaaagaattaaccaggtgtggtggcgtgcgcctatagtcccagctcttcaggaaactaaggtgggaggatccctggagcccaggaagtcaaggctgcagtgagctgtgattacaccactgcagtccatcctggccaacagagcgagaccctgtctcagaaaatcaaaataataataaacagaaaaaagaaaaccatgatcccaacggttagaatttggactgggcgtagctaggtgcttctggcctgggctgggtgtctgtagtcagctgttggacagctggtgactgcgtctagggcttggctggctgttagctggggtgatggggtgatgggcacgtggctctcatcctcttgcaggccagcctgggcttcttcacctggcagctgggcaaagactggaagtgtgccaggctcagaatcacacaccatcggccaggctccttggctcatgcctgtaatcccagcactttgggaggccgaggcgggcagatcacgaggtcagttcaagaccagcctgaccaacatggtgaaaccccgtctctactaaaaatacaaaaattagccgggtgtggtggcacgcacctgtaatcccagctactcaggaggctgaggcaggagaatcgcttgaacccgggaggtggaggttgcagtgagccgagatcatgccactgcactccagcctgggcaacaagagcaagactccatctcaaaaaaagaatcacacaccatcactttcaccacattctgttggccaaagcaagtcaagaagccagcccagggtcaagggctgaagtcatagaccccacttcttaataggaggagctgcaaagagtgtgggacgagggaggagaatttctggccactttgcaatcaaccacagtggcctttgtttcagatcccctttccaccagccctctcacattttgtttgacctctcttcttaatcagtgacccacaaagaacagcccttgacccatgtgagaggccttgccatgggttgcaaagaaaatccagaaatgggagctctttttgcgtcaggttgtatttgtctgcaaataatgggaaaccacatagtggcttaaaccataaggattaacaagtttggaggcgggcagcccatgaagagttatgaagagtacagtcaggccggcgcgatggctcacgcctgaaatcccagcactttgggaggctgaggcgggtggatcactagaggtcaggagttcaagaccagcctggctaacgtggtgaaccctgtctctactaaaaatacaaaaattagccgggtgtggtggcacgtgcctctaatcccagctactcaggaggctgaggcaggagtcacttgaacctgggaggcggaggttgcagtgagtcaagattgcgccactgcactccagcctgggtgacagagcgagactccgtctcaaaagaaaaaaaagaacacggtctttttgtcagctcccatcaaccatcctctgctggtgggcttttcagcctcaggtttgttgtcccgtggttgcaaaatggctgccacagctctagtcatctcaactgtattcaaaactggaagcaggagcaaaagactgtctttctggagaaactctgtctttgtattctggaaggaaaactttccctgaaagtctcactgagcagaacctgtctgtacacttcagtttttactatttgcacaactgtggttactctaactgcaagaaaggctgggaaagtgagtgtctgataaaggagataggaatgcctctggcttagttcaattattttaaggctattttgaccacaactcacagtccaaaatatgtttctttgtgtcgcagtacacacacacacacacacacacattattgaaaccaatttctcaaatactcactcttaccatgtatgatacacgttaatgtcttccattccattccattccatgcattttaattatttaaagcagttcctggtcacaacctgctaatttgatttcacaaccttcaaaggcatgacccatagtttgagaaagactggcctagaacagtctttgtttacatcttagcgttggcaagtgttaaccctgcacagagtcaggcttctgcgagcggaggaggagaggtggggaaatggtgttttgaaaagcaacagatagactttgccacatcatttgcacttcttatcagcaaatgatatcgttctggagactttgtattactggcaggcaacctgaggttactccaatttatattgggaaattaaaattcgcctgtttgtggagcttagctggcccttttaattccgtatcctgctagcagcctggcttctgcacagctcctgatgacagcgcaaaactccgattgcattacaagtggaggaggaattcacacaattttctggaaggacactgtgtcattgttgcgtcatggctgttctctggagctggttgtggttttcaggcccggcctttcctgctttttatagtgtggtggtgaagagtgaggtcttcagaatcacagggtctgagttcaaattctggtcccatggtgcgatctggggcaagtgtcctgaccacctccgagtctccttttcctgtaagatgtgcatcagcagtgcttccgtggggatggggagggatcggtgggtatggagtaagcacaggggctggtacccggaagcactcaggcaatgcgggctcttcagggtgtgccaggcagcttcggctgtgtgatgccacagtgacgagtgggcccgggtcgcagtggtccgtggtggcagaggctggcttctcgctcgtgtgtgtgcccgtggggggttggctgtggctctggccacatgtccgccctgttctggaactcaggggaactatgtgatggctcttgaagcttctgctctgaacagacacagtgcgcccactccatctcatggaaggagaatctttccgtaggagcaggcccactgggtggggggcagcggacagatggttaaaaagccagtgtgccacaccagggcttgtctccagggtgctggtgacaattttgggtccgcaaccctgcatactagttttcaacccccacccccccgcccccccactctgcaacctcagtcactgtttcaaaagtttctgagtgtggggggtaggggagaggtctccagcaccctccctggctgagaaccaccagctgtgctccccaagccagggatggggtctgcctctgcccttttgctgtcctcagcaccccccaccagacacacagtaggtgcctactaaatgtacatttcagcaggttgcctcttgaataaatgaaaggatttgtttaatttcctctgcaaattcattcattcatcccacagatatttattgagctcctactgtatgccacataatgtgccagccccagggatcttgcagaggacaaaacaagcaaaagttcctgtcctgggggacatttcggtagaggagacacacagtaaacaaccaaaccatcagacggatatatgatatttgatgttaaagttttggttttgttttttttgggatggggtctcgctgtcttgcccaggctggagtgcagtggcacgatcacagctcactgcagcctcgaactcctgggttcaagcaattctcctgcctcagtctcctgagtagctgggattaccggtgtgcaacaccatgtctggctggttgttttgtttttttttaatcttcatgtgtgtcttgaaaggcttcccctgccttctgggttgagagcagcaagacacctagctggcctggtgagggtgcacacagtgcaggtgccgcagcgcccccaaaactgctgttttccattgcgtttatctcatctggaaaatgggggtaataccagggtgtttggaaggattcaaagaaccctggtacctggctgaagcaggagatctgttaacccttccagatacacacacaggccatgtgcggcaaacagcaccaaagtggggccggggacttctgtccagcctcactgggctgtggcccaaaagctctgggagtcgccccattagatagcatcaacagtggcaattaaaatgatcacaactagcgtacacactgcttacaaagtactttagggcatggattagaggtgttcctatgtaacagtcccatggaggacgtagtgttatcctccccaaacggaggcacagaggggataagtaacttgtcttagggtacacggctgggaacgggaagtggcagcccagggatgggagcctcagaatcagtcaaggtgcacttgattcctgctgtgagcatgcacaggcagtaaccccagcccctcgcccaatttctttttttctttttctttttcttctttttttttttgagctctgtcatccaggctggagtgcagtggcgcaatctcagctcactgcagcctctgcctcctgggttcaagcaattctcctgcctcagcctgcggagtaactgggattacaggcatgtgccaccacacccagctgttttgtattttagtagagacaaggtttcatcatgttgaccaggctggtcttgaactcctgacctcagttgatcctcccaccccgccctcccaaagtgctggcattacaggtgtgagccaccacgcccggccttcttttctttttgaaatggagtctcactctgtcgcccaggctggagtgtggtggtgcaatcttggttcactgcagccttggcctctgtagctcaagtaattctcccacctcagcctcccgagtagattggaccacaggtgcccaccaccaccccctggctaattttaaatttttttgtagagatgagatcttgctgtgttgcctaggctggttctccaactcctgagtttaagccatcctcctgcctcagcttccctgccttggctgggattacaggtgtgagctaaccatgcctccctcctttttacttctttgaagtaaaattttcctgtgttgaaacacacaaatccgagctgttaaattctgaacactcacataaccacaccttggtcacaacacggactgtttccctctccccaggaagttcccgttcatgtcttttttcttttttttttttttgagacggagtcttgctctgtcgcccaggctggagtgcagtggcacgatctcggctcactgcaacctccgcctcccgggttcacgccattctcctgcctcagcctcccgagtcgctaggactacaggcgcccacccccacgccgggctcattttttgtatttttagtagagacggggtttcaccattcacacaatggtctcgatctcctgaccttgtgatccgcccgccttggcctcccaaagtgctgggattacaggcgtgagccacagcgcctggccctattcatgtctttagtgttgtcattggaatgaaagcacatgaatacaaaatcctcagagacagctctgcagcctccactttgaaattcaccctcgggactggtttgcagaagcctcacgggagctgcatcccctcctgtctctaattctgctggtaggtaggtcgtgcacagagcttgggccacgcctaccagagccagggaggaggcatgaacagacgtgaacccttcatcttgggagctcgtgcacaccttcaggccaggcaggaacagggcacccgcattccagaggaaaagaatcctgtgttccagggtcttgcgacatctgctttctagctctttctgggatcgggacctgagaggaagagagaaagccactcgccactcctgttccttcctcctccttccatgccagtccctttatctccttttccaatccgaagcatcccaggcattcataaaatgataacagagacgcacacccccatcacccagcctcgcgatagtgcctgaacattctgctgtatttgtttcagatcctacgagagaagtagcaggagagggtcgcctgttgggtagtggtgaagggcgaggcctctgcagtgagcctgcctgggctgaaatcccagcctgggtggggtgcggtggctcatgcctgtaatcccagcactttgggaggccaagggggcacagatcacctgaggtcaggagttcagaccagcctggctgacatagtgaaactctgtctttactaaaaatataaaaaattagctgggcgtggtggtgcatgcctgtaatcccagctactccggaggctgaggtaggagaatcgcttgaacctgggaagcagaggttgcagtgagccgagatcgcgtcattgcacccagcacccagcacatagtgggcccgcagtcagcgtggtttatcattgtcatagtcggtccttgttcttcacagatcccgtatttgcgaattcacctacttgcgaacattggtaaccccaaaacggtgctgatcatttgcagaagtgggtagagtggccaaaaaaattgagctgcctgacatgcaggttcccagctgaggtggggcctgatgtcttgtttcagctcaaattgcaaagcagtgtcgtttttgcaatctgtttagtgccacatttttcacatctttgtgagtctttttttttttttttttgagacggagtctagctctgtcaccaaggctgaagtgcaagtggtgcgatctcggctcactgcaagctccgcctcctgtgttcaagtgattttcgtgcctcagtctcctgagtaggcacgactacaggcacccgccaccaggcctggccaattttttctatttttagtagagactaaagggttttgccacgttggccaggctggtctcgaactcctggcctcaagtgatttgcccgcctcagcatcccaaagtgccaggatacaggcatgagccacggcgcccggctgtctttgtgcttcttattggtgatttctctgtttaaaatggctcctaggccaggcgcagtggctcactcctgtaatcccaacactctgggaggccgaggtgggtggatcacttgaagtcaggaatttgagaccagcctggccaatatgatgaaaccttgtctctacttagccgggtatagtggcaggtgccttatcccagctactcaggaggctgaggcaggaaaatcacttgaacctgggagacggaggttgcagtgagccgagatcgcatcactgcactccagcctgggtgatagagcaagactcacacacacaaaaaaataaataaaataaaataaaataaaatggctacaagcagggtgcagaaatctagtgttcctaagggcagtgaggctgtgatgtgccttctggagaaaatacctgtgttagagaagcttccttcaggtgggagttatagtcctgttagccatgagttcaatgtgaatgaatcaacaatatagattaaataagatggcttcaaacagaaacgcatataagtcaaggtgatgtatcgattgatgggtgaaaatacagtggccagaacctggcaagaacctagccttgtattttccccaggagtggcagctcagcgttcacggtgactttctagaacctcactactgcaaatagcaagaattggctgtattttgttatactgaagtgccagtaaatgacatagtataatgttatatactatgtgtatacatagtatataacactatatgttatatacactatagtgtatgtgctacatatatgtagtatatatatgggataatagtatgtatagtgtggttttgttctatttaaattattcttatttttatttttattttatttttttgagatggagtctcactctgtcgcccaggctggagtgcagtggcacgatcttggctcgctgcaagctccgcctcacgggttcacgcgattctcctgcctcagcctcccgagtagctgggactacaggcgcccgccagcacgcccggctaattttttgtatttttagtagagaccgggtttcaccgggttagccaggatggtctcgatctcctgacctcgcgatccacctgtctcggcctcccaaagtgctgggattacaggggtgagccaccgcgcccggacagatttttttatttttgagacagggtctcactgtcgcccaggctggagtgtaatgccactatcctagctcacagcatccttgacctcgtgggctcaagcgattctcctgcctcagcctctcaagtaactggaactacaggcaagcgaccatgcccagccaaaaaactttctttttgtagagacaagatctccctgtgttgcctagccacgctggtctcgaactcctgagctccagtgatactcctgcctcagcctcccaaagtgctgaatttacaggcgtgagccaccgcgccagccattttgtgtgattctaaattttttaaacttcccttgaatgttgccttttcagcctcccgtctctcttccatccccctcctttgtccatccctctcccacctacatcccatagctctgtccgtctctgaccacgtctttttccttttcgctgactttctcactcactgtctgtctctcattttctccacagctggcccccaagaggaccctttccaagtccccagctgggggccctgtgtagacctggagtggacacgcccctccttcccttcatgattcgtttgtagcgcaggtaaccagcgaagcatccctgttcattcctggaggggcaaccgtccctcattccacctccccagcaccaccttggcccctggatgaggaaggagcattccttcctggaagagcctggctaagcaatatctctggttctttcttctcccacctgggcctcctgggtcatctgggccatcaccctgcctctgcattagctgcaagcaaaatctttctctctgcccctttccccttttctccagattctttgcagaccatgcctttgcatgccttctgtgagcgggttggggagggaaggggctcataggtcatggacctggtgacacagggggaggaagcctggtggggctgggatgtggagcaggtggtgagagtacgtcctcaccacttctaaggcagcgagagcccgggaggcacctccccggggacactccccacagccagcccctgagaggtagagtaattggcgtgtggggctctggagatgcatgtgtctctgtgctgcagggagggtgatccgtgaaccctggaaaagtatgtgtcacatttcttacccacatgcatgttttggcatgaaacatgcgtgtgtcattagatttttcacaacttgattcagcaaatatgccccagcccactgtggggggtccctggtcagggctcttcataatgtcactgagcactggggatggaggacttgggggtggcactaaggaggcccctgttaggggagttcagagtatgctgtcagggtgaggggctgtgaaccagctgagggtgcatgtaagattttatatgtggggtttttgggtgggaatggtgacccgtggcagttgtcacatcgtcagtgaggtttgggaccccctaccccaacaaaaaaagagggtaagggaactccacggtcctgagctgtaaattcccaccattcagggatcaggtcttcttttccattgtgtattgtatgtgtcattgggaggagacgggagcagagggtgcaggaagtaatgaagggatgagtggctggaaggatgggtctgtgtgggtatttggcagaagggaaggaggggtgtttggatggaagcttggaaggatagagggatgggtaggtagatggatggaaggatggagggatgggtaggtagacgggtagaaggatggagggatgggtgggtagatgggtagaaggatggaggggatgggtaggtagatggatggaaggatggagggatgggcaagtagatggaaggatggagggatgggtagctagatggatggagggatgaataggtggatggatggaaggatgggagggatgggtaggtagatgagtggaaggatggagggatgggtaggtagatggatggagagatgggtaagtagatgggtggaaggatggagggatgggtgggtagatggatggaaggatggaggggtgggtgggtagatgggtagaaagatggagggattggtaggtagatgtatggaaggatggagggatgggtgggtagatggatggaaggatggagggatgggtggatggatggagggatcggtaggtagatggatggaaggatggaggatgggtaggtagatggatggaaggatggagcatgggtaggtagatggatggaaggatggaggatgggtaggtagatggatggaaggatggaggatgggtaagtagatgggtggaaggatggagggatgggtgggtagatggatggaaggatggagggatgggtaagtagatggatagatgaaggatgggtaggtagatggatggaaggatggaggatgggtaggtagatggatggaaggatggaggatgggtaggtagatggatggaaggatggaggatgggtaagtagatgggtggaaggatggagggatgggtaggtaggtggatggaaagatggagggaggaggagactgatggctagagggaggaaagaggaagctttggagggagggttggctagttaaatgtttctgagggctggttggatgtttggagaaatgtttggaaagataaagaagtggatggatggatggatggatggaggcagggaagggagggatgttttggagggttggaggaatatttggaggggtgtttgaggggagggaaggctagatggatgggagggtggatgggtaaataaatacagagaacacctgcttcccctggtgtcagatgggactaacgatcccttccctatgggggtggaacaagctaacattgctgaagtgctcagacagtgcctggcacctagtgagcactcgacaaatgttagccatcctcatcctcatcattcagaccatagggctcagccttgccccggtggcttctctgactcagagcgcccctcctcatgagcccctctcccttgcttctgcctcagtttccccaccaccctccccttccttgggaacacattgcagacatcttcaagggtcacccagagccttgagccacaaagcccttcttgtctacactggctccctcactccttcacccgtttatatgtaggacagacccccaccacacgcctcatgtctggggaggcaggacagcagggtggtgaagagcagggctcaggagccaggcttcctaggttccaggcctggctctgctgcctgcttgctgggagacggaggatgaccctcccggtgcctccagttctcatctgcaaagtacaggccgtgggacccctcctgggataccctgaggattagcttagtgtgtgtgaggcatggtcaggactcacttagtcttggttgatatcatcattatcatcatcaggtgctgggagagttggagtgggaggaaaaggaccctgtccctggtcaggggtttctggctgggagggcacctgggaggtattccttgtccccatctatccccatggactcaagggaacagaaactctgaccccctccagggggctcccctgaagggagggggccaggcaagctgccaaaatctaaccttgtctccctcgccctcttcctgaccccaccccatccagtggcgatggatgatgaggatgggagatgcttactagacgtgatttggtgagtaacgggctccccaccccctgccctctgtctcaaccccctcccttccctcccctccccagctccttacctcctcagcgtctcttcctcttctcttccagtgacccacaggccctcaatgacttcttgcatggatccgagaaggtaagcatgggcgcagggagaggcattccctgagtggggggctgtctaattgggagtgagggacagggagagacatgtccctttgatgaggtagccatctgccttgtggcttctaacgccaggcactggagttacggccatgagcaaaactcatggtaatcccctgtcctccttccatggacacctccttgggaaacaaagaaaccagtcactaataaaggtaatggtgaaaaggaccatgtagagtatgataaaaaataataatgtcatttgcacaatgaaagaggtttaaaagaaaataaatgggtcccaggggctcctttagatagtgtgatcagaaagggtcacacgagggaggtaacattgaaggtgagacctgaaggatcacagggaggtaggtggccaggcccggtgctcctggcagagggaagagcaagttcaaaggtgggagagagcttggcatggttgaggaacaggaaggaggctgatggggccaaactgaagggaaaactagtaggaggtgagactgtagtaggtaaaagtcaccaggttgtgtaggcctggaagcccgatagaggagttgttatttttattctgaatgtgacaggcagctctgatgggcccttaaacacgagaatgccatatttgatttgcttcccagagaacggaacaaaatggggaaaagtagaagtctgttgagctctgagcagctgtattagtatctatggctgtgtagattatcccagcatgcagtgccttcaacaattgttagagctcttgcagtgtctgaaggtcaggaatctgggagcagcttagctcggtggttcaggctcagggactctcatgaggttgcagtcaagctgtaggctggggctgcagtcatccaaaggtttgactggggctggcagatgtgcttccaccaggactcattcctgtggctgttggcaggaggcctcagttcctcaccacgggggcctctccttagtgctgcttgagtgtcttcacagcatggcagctggcttcccccagaacgagtgatccgagagaggacacaggaggaacccgcagtgcccttaatgacccagtctccaaagtcccacacccttcctcccatcacactgtattcactagaagctaatcagtcagtctggccagcactcagagggaggggaattgagctccacctcttgaaaggagaggtttcaaataatttatagagcagaggcatgagcaatgggatgatggcagcctgggccatggtgcaggcagtgggggaggcatgtggcactggatttgggatctatctgggaggtggcatcaactagacttgctggtggactcgatgttgagggggagagagtgtccaccatggctcctggattttggcttgagcaactgagtggattctggtgccattttctgaagttgggaatttggggaagattccagaagtccaggtggtgctggtggatgtacaagttggggttctggagagatgtccagatggaacaagaaattagggaagcccgagccatggacatacattcactgggcacatatgtggatgccagggcctgttctgggcactaaggatggtgctaagcatctgagaatgccctgcccttccagagatggcaccgcatggcttgtcaggtgcccggatggtaggtgtgccaggcactcaggctgcgttgggaaaggagtacttagtgagaagggacaggagctgttggaccacgagtgaccactcctgaaggctgtgctactggagagactggggggcagtggcagggcgcagcttgggcagaggcgtgaaggcaggattccggaattcgaggcagtcacagcaggatcgcttcgcaggccaggctcggggactcagtgctggggatgccttgggttttaggcaggcacccaagcccctgcctttggggcctcttttcggaggcgagagtttcccatacccccagccctctcccatcccaacccttgtctttttgtcctgagtgaccctaaattggtttctgctccagagcatgggcctgccctgctgacttttgaccttggatggggcgggtcttgttgcagcttgacagtgatgacctcctggataatcccggggaggcccaaagtgccttctatgaaggtcctggggtaagtgccgtggctcccgatcattgcctgagctgttggggctgccagcgggaggagggccctgaagccaagaggggaggcttgggctcatctcgtgagggctgttgacaggaggagggcgggggtgggccacccagggtggctggaccaccctggcagtgcaggagggagcagagctggggaaccctgtggggggccaacatggacaaggctgactgtgccttgcagaccccttggggaagaggtgagggtccccgaggccttggggccctggggtggctcatgcagagtggttctggggagctgaagcggatgtgggttgtggggttcacaggggcactcctggagagcagagggctgggggaggcctggggtcctgcccaactcagccatggcagggtgtgacctaggggaggggcctcctcacctgcagacttcagtcttcacctgggcagtgaatatgggtgctgagaaaagcccagagtggccaatgcagaggatgtttattgagcacctactgtgtgcctgactatgccggtcccatgactaagtgccagttgtccacaccacggtggccacctccttcctccttctccctcttctgttgctgctttccccccttcaccttttcctccccccaccttccttcggcctcccccctccccgcctccccttcctccttccccccctcaccctccccgccttccctcttcatcatcagaacacgcattcaccaaacacttattatacgaccagcccttccttgttatcttcatttagttctcacagctataatatcatattccaaatagcttatctttcataatataaatgatgaggaaatgtagtaattatataatgttggtctatttacaggcccagtaacagtggtgatcctgttactattttgtgatcacacttcttaccacgaccatcatttttgtataccctaagatccccattcaggttctaaacactctccacacgtgacatcagtgaattttcacaggcatcccaggaggcaggttggttgtgaccatctggcagttaagagctcagggggttacagtggcctgcctggtcctcagtcggttggaggctgagccagagccctgtctgcctgccactccccgccactcaccagtggttgacccaggcagttccctcgtctgtgaaatgaggaagggagcagcacccgcctcatgggactgtcaccaacaacagcatggagaatcacaataataatgagtgatgatgatagatgcttctcgagcacctgccaggggccgggtgataccgtgaaccctccatgtggatttactgagaatcctggaagctgcagattttgatgggttatctggtcagtattggtggagatggaaatctgtatcataagtattgtttgtggggctttccacacatatgcctgcagatatttttccatgcgtgtcctgggttgcagtccaggatagcatgaaaagcacttaaaaagcattgaggctgggcacggtggctcacgcctgtaatcccagcactttgggaggccgaggtgggcggatcacctgaggtcgggagttcgagaccagcctgaccaacatggagaaaccctgtctctaccaaaaatacaaaattagccgggcatggtggcacacgcctgtaatcccggctgcttgggaggctaaggcaggagaattgcttgaactcgtgggcggagattgtggtgagccaggatcacaccattgcactccagcctgggcaacaagagtggaaactccgtctcaaaaaaaacccaaagaaacaaaaagcattgaactcacagtgcggttggcacagaagttcacaaatgggagccactgctgatgtgagctttactccaccagaactacgactgcttgtcagaaacctttagggccaggtgtgtttcagaatttcgaatttctccaattctggaaaagtggtgccatatgtgtggtgtgtgtcatgtcacacgcttgcctttcggcggccaaacttgggatgtcacatcatgtggataaatggatcccacctaaagtgccatgttggttctggtcaggttttgctgccaacagagctatgaaaacagtctcagttcttagagctttttgggttttgtaattacagataagtgttgtgggcctatatcactatttaaacaatagttgcttatttttatttatttttgttttgttttgttttgagatggagtctcactctgtcacccaggctggagggcattggtaggatctcagctcattacagcctccacctcccaggttcaagccattctcctgcctcagcctcccgagtagctgggactgcaggcacgtgccaccacgcctggctaattttcgtatttttagtagagatggtgtttcaccatgttggtcaggcaggtctcaaactcctaggctcaagtgatccacctgcctctgcctcccaaagtgctgggattacaggtgtgagccaccgtgcctagactttatttttgttttttgggcgtcagctggtagagattgggggacagcacccccgcgggcttgggctggatgggcatgggcgtgcgatgcaggatcacgttgggcgccgggaccagtggtgacaagctgaggcctggggccaccaccagcggctttcctgagggtgccccgctgggtcttactcttgtcacttaggctggagtacagtgacacaatcatagctcaccgtagcctggaactcctgggcttaagagatcctctcacctcaggctcccaaagtgctaagattacaggcgtgagtcactgtggccttgaacagtagttttttttattacattttactgatgggtacagatgaagaaactgaggtcagatcaagcacgccctaggttacacagctaagccttggcagagctgggatttgatcccgggtccagccacttgcaggtggaatgttcttttttcttttttttttctttttttcttctttttttttttttcttctcaaagtcttgccctgtcaccgaggctggagtgtagtgaagtgctcgtagctccactctgcagcctcaaactcctgggctccagtgatcctctcacctcagcctcccaagtagctaagaccacaggcacatgctgccacccctgactaatttttcttttttaaaatttttttctcactgcgttgcccaggctggtctcaaactctttggctcaagccatccatcctcctacctcagcctcccaaagtgctgagattacaagcgtgaaccaccatgccaggagggaatgttctttcttgaacgtggctgccctgtcacctcagcattctttgcggcagctgtggcctaagcgtagccccttgctaacctcagctctttccttcccacctttcccggcctgcagctccatgtgcaagaagcttccggcaaccacctgaacccagagcccaaccagccggcccccagtgtggacctagacttcctggaagatgacatcctgggctctcctgcgacagggggcggcggcgggggcagtgggggcgctgaccagccctgtgacatcctccagcagagcctccaagaggccaacatcacggagcagacgctggaggccgaggctgagctggacctgggtcccttccagctgcccaccctgcagcctgcggatggcggggcaggcccgacgggcgctggaggggcagcggccgtggctgcggggccccaagccctcttcccaggcagcaccgacctgctggggctgcagggcccgcctaccgtgctgacccaccaggccctggtgccgccccaggacgtggtcaacaaggccctgagtgtgcagcccttcctgcagcctgtgggcctgggcaatgtgacactgcagcccatcccgggcctccaaggcctgcccaatggcagccctgggggtgccacggcggccacactgggcctggcgcccatccaggtggtgggccagcccgtcatggcgctcaacacgcccacctcccagctcctggccaagcaggtgcccgtcagcggctacctggcctcggcggctggcccctcggagcccgtgacgctggcgtcggccggtgtctcgccacagggggctggcctggtcatccagaagaacctctcggccgctgtggccaccacgctcaatgggaactctgtgttcggaggcgcgggggccgcctcggctcccaccgggacgccctcgggacagccgctggcggtggccccaggcctcggctcgtcgccactggtcccggcgcccaacgtgatcctgcatcgcacacccacgcccatccagcccaagcccgcgggggtgctgccgcccaagctctaccagctgacgcccaagccgtttgcgcccgcgggcgccacgctcaccatccagggcgagccgggggcgctcccgcagcagcccaaggccccgcagaacctgacgttcatggcggcggggaaggcgggccagaacgtggtgctgtcgggcttccccgcgcctgcgctgcaagcgaacgtcttcaagcagccaccggccaccaccaccggagcggccccgccgcagccccccggggccctgagcaaacccatgagcgtccacctcctgaaccaaggcagcagcatcgtcatccccgcccagcacatgctgccgggccagaaccagttcctactgcctggcgccccggcggtccagctcccgcagcagctctcagccctgccggccaacgtgggcgggcagatcctggcggccgctgccccccacacaggtggacagctcatcgcgaaccccatcctcacaaaccagaacctggcgggcccactgagcctgggccccgtgttggccccccactccggggcccacagcgcgcacatcctctccgccgctcccatccaggtgggccagcctgcgctcttccagatgcccgtgtcgctggcggcgggcagcctgcccacgcagagccagccagcgcccgccgggccggccgccaccactgtcctccagggggtcaccctgccccccagcgccgtggccatgctcaacacccccgacggcctggtgcagccggccacccctgccgctgccaccggggaggccgcgcctgtcctcacggtgcagcctgccccccaggcgccccccgcggtcagcacacccctgcccctgggcctccagcagccgcaggcgcagcagcccccgcaggcccccaccccacaggccgccgccccgcctcaggccaccaccccccagcccagccctggcctggcgtctagcccggagaagatcgtcctggggcagccgccctctgccacccccacggccatcctcactcaggactccctgcagatgttcctgccccaggtaagcagggcggggcaagggagcaggtaccggaggaggcgggtttgggaggaagaggggtcctggggcgaggcgccaagatccaaaagtggatgccactgtggcagctggggggggaaggtctcagtcatggcacaggtggcccctaagaggaggcccgaagggtgagggccctggctgaactggcaggaagatggattggcaggttggctgactgatagacaaggggcaggacaactgttaggcagtgagagggactggcagacagacagacaaagagagggaccagtgaacagacagaagggtaggcactggctgggctgctgacagatggagaggagagggaccggcagggagagggactacccgacggacagagaagggcaggcactggctggcctgctgacagacaaggagaggaatctcagagagaaagtggacgagacagggacagagggacaggcaggtggggcaggagagaggcagggcaacgtggagctggcagaggggccaatgggagctcagaatggagcaggctgcctgggtttcggcctctgtgcctggcaccctgcctgccaggctgcccactaccccattctctggaaccctgggagcgtcaataggggcaggggtctcgggtggggaggtcgagggcctgtgggggcggctttctgatcctgtgcgggctgcccgttgcaggagaggagccagcagcccctctccgcagagggcccccacctctccgtgcctgcctcggtcatagtcagcgccccgcctcccgcccaagacccagccccagccacccccgtcgccaaaggagctggcctcggccctcaggcccccgacagccaggcttccccggctccggccccccaggtagagggaccccagcagcctgtgtccgcagcacagacccagcctcgcccctcctgcccgctctcccgctcctcgctctccgccctgcctgcgtctctgttctgctgacttggaacacagagctctccttcaccccccaagtgtctcctagtgatcatggatgcctgagaccagggccggccctgggggagcccacgcgctgcaggaatgcaagacacacacggaaggaaatctgttctttcctaaaattataattttcaaatctgaataagtaatacattcagataattcacatttcaaacggtacaaaaagatgcatagtggaaagcccccgtctcctgaaccgtggcctcctgttgtcctcccaaggtggtttcttgcatttgttatctggatagggaaacagaatcaaatagattcttttccttcaatttttacaaaaagggtagcatcttctgcctgcggtattgcatcttttattatttaaaaattgatcttggagaccattcttcattctctctctctttttttttttttgaaatggagtctcactctatcacccaggctggagtgcagtggcgcgatcttggctcactgcaacctccgcctccgatgtttaagtgattctcctgcctccacctcccgcgtagctggagttacaggtgcccgccaccatgctgggctaatttttgtatttttaatagagacggggtttcaccatgttgcccaggctggtcttgaactccagacctcaagtgatccgcccgcctcagcctcccaaagtgctgagattacatgtgtaggccactgtgcctggccccattcttcattctcttgtgtgactgcgtagtattccactgtgtgggtgtgcggatatttatttagccagtctaaattgttgttaggtttttaggtcacttctgatctctagctattatgaacaaggctgcaaagaatgcctttgtatgtatgtcgttttgtagggtaagttcttcaaaaggaatttgctggctctaaaggcatatgcatttttatctctgacagacattgccaaattgccgcctgtggagtgtaaattagtttaacctttatcagcaatatgtggttgtgccttttttcccccgccccccgcaacctcaccagtatgttgaacttggccaatctagataggtgaaaaatagtatcttgttttgttttcatttgcatttcttttattgtgaatgaggtcgggcagattttcataaaagtaagagccatttgtactttctgttctatgaaactgctcataccctttgccattgtaaaatctgggttgctgtcattttgctgtagatttgtagaaactctttacatattaggaaaattagccttttgtcttaaagtaataaccattatgcttacgagtcataacataacaggttagggagggctacgttctttttttttttttgagatggagtctcgctctgttgcccaggctggagtgcggtgtcgcgatctctgctcactgcaagctccgcctctcgggttcacgccattctcctgcctcagcctcccgagtagctgggactacaggcgcccgccaccacgccgggctaattttttgtatttttagtagagacggggtttcaccatgttagccaggatggtctcgatctcctgacctcgttatccacccgcctcagcctcccaaagtgctgggattataggcgtgagccaccgcacctggcctaccttcttattctagagcagtgaatgtggtactcattcaaaaaagaccagtggataggtaggaagaggagagtgtgacagtgacaagggcaggatggcagaagtcagcacaggctttgacctcgaacggccatggtttcacttgcacgctctcccacttaccatttaaccttcagcaaccagtttttcattccatcagcaggtgcctaggcaggctgagggagcacttaggtggagtaaacgagttactatatgcttagcacaaagtaagcacttgataaatgtttgcttttattattattactattatcttgagggggacagagtcccactccgtcgcctaggctgcagtgcagtggcaagatctcggctcgctgcaatctccacctcctgggttcaagtgattctcctgcctcagcttctgggtagctgggattacaggtgcctgccaccatgtttggctaattttcatatttttagtagagatagtgtatcaccatgttggccaagctggtctcaaacgcctgacctcaggtgaaccacctgcctcggcctcccaaattgctgggatttacaggcgcccgccaccatgcctggctaatttctatatttttagtagagagatggggtttcgccatgttggccaggctggtctcaaactcctgacctcaggtgatccacccacctcagcctcccagagtgctgggatgacaggtgtgagacaccgcgcccggcctagcactctctcatttaaacctcaccacctccaccaggtaggtggtagcatctcattttgcaggtgaggaaacagaggcacagggagaataattagcttgcccaaggttgcacagctggcaaatggtagggcctggattaaaaaccctgggggcttattgctggaaacacctgaagtcttgagaaagccagacctgggtgtgaatccagctctgcttagtggagctctctgaggcatggattttgcatctaaaatgggaataagcccagtgacctgacatgatggcactgcacagagccagcgctcagtgaacagacacttactgttagcagttgcagtaatgatgctgtagctgaacttatttttttggaaacagggtctggttctgtcacccaggctggagtacactggtgcaatattgactcctacaacctccgcctcccatgcttaagtgatcctcccacctcagcctccgaagtagctgggactacaggcatgtgccaccacgcacagctaattttttttttttttgtattttgttttgtgggggagatatggggtctcactatgcagcccaggctggtctcgaactcctaggcttagtaatcctcccaccttggcttctcacagggctgggattatggacgtgagccactgtgcctggccacgcggatgacctttgagaaggaagcttagtgcgcacaggcaggtgtgcacacgagctgattcttagtcacacacagaggctcggaggcacaaggtagggccctccgcagtagctgtatctgcagcagtggggacccagcatgacagaaggtggtcagtgaatgtttgttgggtgagcaaatggatggacagatggatggctgaatagacggacggatggatggcatgggtgggtgtgtgactgggtgattggccaagtgtcccctggtggggacagaatcatccagactgggaaccgctatcctgtggatatgcaggaatgcacggaatagcagttcccaatctgggtgattcttactgtttgtaagaatagtggttcccttactgtccgaactccaacccctgcactcggaaggaactctgtgctctctgtacccagatggatttggcagcctctgtgtgtgtgtgtgtgtgtgtgtgtgtgtgtgtgtgtgtgtgtgtgcgcgcgcgcgcgcatgcgtacattttccctttgtgttaacacaaacagaaatgcaaagactgtgttctgcatctggctttgcttatttagcaacgcatcttggagcactggctttcagacctttttttttccttgacccaccacccgggataagaatttgtttttttttttttttctctgtcacccaggctggagtgcagtggcacgatcttggctaactgcaaccttcacctcccaggttcaagcgattctcctgcctcagcctcccgagtagctgggactacaggcgcacgccaccgcatccagctaatatttgtatttttagtagagacaggttttctccatgttggccaggctggtcttgaactccttacctcaggtgatctgtctgccttggcctcccaaagtcctgggattacaggcatgagccaccatgcccggcacaagaatttcattttatgtcaccacccaggacatgcatacatatatgtatttgtatatatacacatatcactgaaacaaaagtttcatgaaatattacctatattacaatgtgtgatacacatcaatattttctattttgtttccattgttttttctggggttagcggggaggcatggagtctccctctgctgcccaggctggagtgtagtggcactatctcggctcactgcaacctccacctcccaggttcaagcgattctcctgcctcagcttcccaagtagctgggattacaggagtgccccaccatgccaagctgatttttgtatttttagttgagacaaggtttcaccatgttgccgagggtggtctcaaactcctgacctcaggtgatctgcccaccttggcctcccaaagtgctgagattacaggcgtgagccactgcgcccagcctctactgttctttttaagtgctggttccaactccctaagatgacttgagccattaccaatggttactatgtgtaggggtgtgtttttatttttgggggtttttttgcaagctaccatctgggaagattgctgtgatgtgggagttaggaaataggacttggccacttacaggccctgtgaccttcagcaggctgcttgcctctctgttgtaccacggtgtccttgcgtgcagaatcagaatgataggaacagcggctactttgtagagctgtgagggttaaataaactaatatctgtaaattaatagatgtatattaacattaaaatgttttagaacagagttgggcatgttgaaagagctatgaagggaaagaagccaggcaaactttctttttgcttatttgatttttattcatttatttgtttatttttctgggcaactttctataaagaggcaatagtaaacgtttcaggcttttgcgggccatatggtctctgttattatagcacaaaagcagccacagaccatatgtaaatgaatgaacacgggagtgttccaataaaactttatttaaggacactgaaattggaatttcatgtaatttttgcaagtcacgaaatagtattcttatgattttttttcttcaactgtttaaaaatgtaaaaattattcttggcttgtgggctatagtttgcctctttcttttgatgtctttattgtgttttgtgatatggacataccattatttctttattcagtcccctcttgaggaatacttcaggtggtttatttgtcattgttaacaaacaaaactcctataagatattcttgactgagcgtgttggctcacacctgtagtctcagcactttgggaggccgaggcgggcaatcacctgaggtcaggagtgtgagaccagcctggccaacatggggaaaccccatctctactaaaaatacaaaaatgagccaggcgtgatggtgggcacctgtaatcccagctatgctacttgggaggctgaggcaggggaatcccttgaacctgggaggcggagattgtagtgagcctagagagggttgcagtgagctgagatcgtgccactacactctagcctaggcagcagagtgagactctgcctcaaaaaaaaaaaaaaaaacttgcacccatgctttgcacacaggtatgaaagtacttgtagggtaaatttctagaaatagaattgccagacgtagatgataagctttccagccattttgtggaaagtgctaaacctttttgaaaaggttcatgccagtgatggcttcacttggtcctgcagctttactgacacacgagattagcagctggcctgttctttgccaggctggaaagtgacacaccccctgtgcttttctctaattgtgtgtgaagttgagcatcttgccgcctccacgtggggctctcgaaatctcttggaagctgggcgtggtggctcatgcctgtagtcccagctactcaggagggaggctgaggcaggaggatcacctgagcccaggagtttgaggtcagcctgaacaacatagcgagatctcatttctgaagaaagaaagaaatggaaggaagagaaggagggaatctcttggtgaacaatccactcatatgttagtttttttgctttgggaagctaagatgggggatcacttgaggctagcagttgaagaccaaataataataataattttgtgctcatttagagaatgtagaaaatacagaaaagaacaaagaagaaaaataagtcacatgtaataccactgtgtgcaagcagttggtaaaaaaaaattttttctggccaggcacagtggctcatgcctgtaatcccaacattttgggaagccgagttgggtggatcacgaggtcaagatatcgagaccatcctggccaacatggtgaaaccccgtctctactaaaaatacaaaaattagctgggcatggtggtgtgtgcctgtaatcccagctactcaggaggctgaggcaggagaattgcttgaacccgggaggcggaggttgcagcaagcgagctgagattgagccactgcattccagcctgggtgacagagcgagactccgtctcaaaaaaaaaaaatttttttttctttgttttgttttattttttgtttttgagacagagtctctctctctctctcgcccgggctggagtgcagtggcgcgatctcggctcacggcaacctctgtctctgggattggagcaattcttctgcctcagcctcccaagtaacttggatttacaggcacatgccagcaagcccggctaatttttgtatttttagagagacgaggtttcaccatgttggccaggctggtcttggactcctgacctcaagtgatccacccgccttggcatcccaaagtgctgggattacaggtgtgagccactatgccaggcctagctttgttttttctaagacaaatattgtagaagaagtaatattttggtatgaagtttctgtttaaccccccgaccccaattttatttaaaacattttttaaataagtcattttattcacatagtatgatcatcagaaagtttttttttctttttttccagagacagggtcttgctctgttgcccaggctggtcttgaactcctgggctcaagcagtcctcctgccttggcctccgagagtgctgggattacaggcatgagccactgagcctggcctaatttatttttatttattttttctgagactgagtctctctctgtcgcccaggctggagtgcagtggcaagatcttggctcactgcaagctacgcctgctgggttcaagcagttctccctgcctcagcctccggagtagctgggattacaggtgcacaccatcccgccctgctaatttctgtatttttagtagagacagggtttcgccatgttggccaggctggtcttgaactcctgacctcaggtgatccgcctgcctggcctcccaaagtactgggattattataggcgtgagccaccacgcctggccacctggcctaatttttgtatccctttccagttcttcgtgtatatacaacctagtgcaaatatggtttacgtttctctcccatttgtacccaaaggggagctcattatgtacttactgtggcagcaacagtgagtttgcttgttttctgttagagtcttgaagtattcctttgtacagaagagccacagttcatttccccaggaaatgccatattgatgcactttagaccatatccagattttggcgttctacacgaagctgcaggaaacaacttgttcacctgttttgtttttgtttttgtttttgagacagagtttcgctctttttgcccaggctggagtgcaatggcgtgatactggctcactgcaacctccgcctcccaggttcaagcaattctcctgactcagcctccctagtagctgggattacaggtgcacgccaccatgcccagctaatttttgtatttttaatagagacggggtttcaccatgttggccaggctggtctcaaactcctgacctcaggtgatccacccgcctcagcctcccaaagtgctgggattacaggtgtgagccaccgcgcccggcctacttgttcacctgttatttcccacatatgcaggtctgtttacttcctggaagcctgtttgctggactaaagcaaatgtgcatttataacttggatagctactgctgaattgcgttcctcttgagttgtagcaaattgtgccagttgagacccctaagggcagtatatacaagcatctttactagacataggctttattcctaatgcgacgggtggtaaatggtaccctagggtgaaaaatagtgccctggggtgcgttttgctgtgcatttctcttattacaagtgaggttgagtagctctgaaaatacttaagccttttgtctttccttttctgtgcactgtctgatcatatcctttgcccctttttcaccagttgtaattcttagtgatttctagagtctctctatatatgagagagatgaactttgtatttggagttgcaactgttttccccagtaagtcatttggcatgtgacttaatttgtggattgtgtgtgtgtgtgtgtgtgtgcgcacttttgatgagaatgaaattaaatttttttaattttttggtatctttaagctttttatgtttaaatgacttcaaacacataaaaagtttcagaattagtacagagagctcataggagttctttactcctcaactagatgtattagttatctattgctatgcaggaaattaccctcaaaacttagcagcttcaaacagcaagtattcacgtgtctcacactgtttctaaacattaggaatctgaaagcagcttagctaggaggttctagctctggatctcccatgaagttgtggtcatctgaaggtcccactgatctggagaacctgctcccacgctcacttgtgtggctattagcaggaggcctcaattgcttcctcagtgggcctctccaaagggcagcacatgacacacagcggttggcttcccgcaaagtgagtgacccaatagaaacagacagaatgctcaggatgggagccgcaggctttttataactaatcttggaagtgtcatataatcacttctgccaaattctattggccacaaagaccagcatatgggaggggactgaacacaaggaggtgaggattgttggtggctgcctcccacgtctacccattgtcagccttttgctacatctgccttgaccttagcattctcattctgtgtacacttttttctgaatcagttgagagtaagttgcaaccattatacccgtttgccccttaatattttattttatttatttatgtatttatttatttttgagtctgagtctcactctgtcgcctagtctggagtgcagtggtacaatcttggctcactgtagcctctgcctcccaggttcaagcaattctcttgcctcagcctcctgagtggccgggattacaggcacacatcgcaccctgctaatttttgtgtttttagtacagatggggtttcaccatgttgactaggctggtctcaaactcctgggctcaagtgatccacctgccttggcctcccaaagtgctgggattgcaagcgtgagccaccgcggccagcctaccccttaatattttagtataatatttcagccttggagaacaaggacattctcttacttaaccatcatactgcaaagaaataaagcagacagcattgacatgatactgttgtcatatcctctgtccataatccaactttaccaggtgcccagggatcctgtaatgttgtattattctcctatttcatgtagcattggagtgccgctgcatgtgggccacctccctgagcccttggaacctactgagtgggccagttctcttttctccgactcagcgacgcacctgccattggccatttgagtcatttctccttttcctctattgtaaatgctcccaaagtgggcaaccccatagcaagtacttgaatattcttttttttttttgagacggagtttcactcttgtgcccaggctggagtgcagtggcgcgatctcatttcactacaacctccgcctcctgggttcaagcaattctccagcctcagtctcctgagtaactgggattacaggtgcatgccaccatgcccggctaattatttttgtatttttagtagagacagggtttcatcatattgatcaggctggtctcgaactcctgacctctggttatctgcccgcctcagcctcccaaagtgctgggattacaggcgtgagccaccgtgcccggccgaatattcttcatcacagattcctggaggggaatttccaggtcaaagttgtgaccctttcaaagtccccagaccaagctgccttccaggaggcagtcccaccagccgtacacagcgccaaggactgcgcctctcatctcttcttagaggtggcaaaccttttgaagactgattgattgattggtttggtttggttctttaactgtcagaagttactcagggcccagcttggaagggatgctggaagggccctgggacttagaggccaaagctggtggtgaatctgatgtcatgccgagatgcccggttctggagtgtggtggtgctggctgtcctcgggcagatatcctgagccctctgagcctgaactcagtcagctttgagaaatggctcagaagtcactgagcagtgtaaaggcctcagttccgccttcaccagcctggagagtctggaccagttttggagccttggcctcagtttcttatctgtgaaatgggtccagtgttaccactgccctcagggctagggagagatcacacaaatggatgcgggaggccggccattcgtgttagatcagcatgagctgttactaggatgcagattctgtgacagcaagtatcacggtgccagcccagtgttgggtgcacagctggtgcccactggttacacagtggctgctctggttatgattctttgggaggagggtccagaacggcaaggtgctccgtctgagacatgctttaggcgaggtggctgtgtgcgtgtgacagaactagcaccagatcgcgtgtgcttgcagacacaggcttcatcagagtctggtacgtcgtgcacacgcatgcacgcttgtacctgcaagctcacgtggcgcccaggtaggcctgcagccatggacacacaggcacacagaggcaggtgcccaggacacttagaagggggtccaggccttcccatgcccgcatccagaggtccacacgtggctgtgaacccaggcctgtccctgtgtggccatccgtattctcggcagcccccgtgccgtggccatcaaccccgagccatggtacacagcatcatgctggtgtctctttgccttgacttggctggatgggctggtgggggctggcggctgggacgctgccctgcctgccctccttccccgctgctgtgctcgccgcccggccctcctgcctcctgctgggcagcgggtgtggtgcccctgctgccaccgccaccactgcctctgcttcctctgctgctgccaccccaaccctgcagggctcgcctttgtctggggaactgcgaggggtggggggaatggggcagaagtggggttgagatcggaggccagagaaatgtggaggagctgcggtgggggacagaggtcgagggcaggtggagggggtgctgtggggaatgagaggcgagggagggaagggcagccgtggtgggctcctctctcaggatgggtgtgggctaggaagggggcttctggcggggatggctggggaccccagtgtcttggggcaacaggagctatggttggttctgacccccgcccctcccctctccctccctcccctgcccagatcccggcagcggctccgctgaagggcccaggcccctcttcgtccccgtcactacctcaccaggcccctctgggggacagcccccacctgccctccccacaccccacccggcccccttcccgcccaccctcccggccacagagtgtgtcccgccctccctcagagccacccttgcacccttgccccccaccccaggcccccccaactctgcctggcatctttgtcatccaaaaccagctaggcgttcccccgcctgccagcaacccggcccctactgccccaggcccgccgcagccgcctctccgcccccagtcccagccgcctgagggaccgctgcccccagccccccacctccctccatcctccacctcctctgctgtggcctcctcctctgagacgtcctccaggttgccagcccctacgccatccgacttccagctccagttcccacccagccaggggccccacaagtcccccactccccctccaaccctccacctggtccctgagccggcagcaccccccccaccgcctcctcggaccttccagatggtgaccacccccttcccagcgctgccccagccgaaggctcttctcgagagatttcaccaggtaacgggaggcagggactgcccgccccatcagccccatcccatcccaccctctcagtctgatgggagcccctccgccttacggctctgtgatcctccccagccctgctgcgtctggacacccctacacctagcctatgttccccacccctcatccacctgtcccctcctcaggtgccgtccggaatcatcctccagaacaaggctgggggggcccctgccgccccgcagacctccaccagcctggggcccctcaccagccccgctgcgtctgtgctggtcagtgggcaggccccatctgggacccccactgcccccagccacgcccccgccccggcacccatggccgccacaggtaggagagaggtcgcctatgtgcccagggagacggggcctgaagatgggtgggcggggctgagcagggagaatgggctggggcagggctgtgggactcagcacagggcatcagccagaactcaagggacacaggaaggccagaggtggcagggctggccccagatttgaagggccggagggccaggaggagagcggtggggtacaggatggggctcccgtttgaggagggggccttcatgcagtgaccgcaggccctgtctcccccaccccacccacccccaggcctccctcctctgcttccagccgagaacaaggcttttgccagcaacctcccgaccctgaatgtggccaaggccgcttcctccgggccagggaagccctccgggctgcaggtaaggggcccttagagcaggggtcaggacaggaccaggagtcttcgggaactgggaactggggctggcaggggcagggagacactggaagacgcggacaggatgaagctgggaccatcaggcagctgagacaccacgaacagccgtgcagggacaggaagggcagaatgacacccagacaggcagccagagatgagggagaaacacggagacggtgggacggagacggcaccaagactactggcaacagtgtaagggactatgactggggaaagagcaggtgatatggacacaggacgggaaggacagggctgagatgacaagatgtgagctcaggacaggaaaggcgggtttagatgagacagaccggagacggagcagatcagggaccgagaatgaaagggtgagagggtggggacagctgaggccgaggccacttgtagatgtaagacgtgggggagacagaagacaaggagaggagcaggtgggaggaccaggacccaagaggccgggagaagctcagagatggagatgccagaatgaaggccagacgctgaggacaagaggggaagccaggaagggaggcgggggggcgaaacgacaggagccacactgggagagagactgtgcgaggcaggggcactgggtgctgggcggtgatgtgggaagcaggcatccggcagaggagggaggtcacacagaggcagccctgggcgaggggacggagggaacccaggcagaggacacccagggctccagcctgcctgtcaccctctccgtccactccccagcccagcccaggtcttcccctggggttcattgtgatgggcaggggatcctgtagctggggccaggcccccacctgggtgagacactggtcccctgtcccgtctttatcctaggctagaggggaagctggtcgggggagggaaggcttctggaggcaaaggcctctcactcgcctttcttctcccagtatgagagcaaactgagtggcctgaagaagccccccacgcttcagcccagcaaggaagcctggtgagtccacaccccatccttgcatgcctgccctgtaccttccagagacctgggggagcatggggccaccctccagaagcagagttgggcaggcccaagtgccaagcccagctccacctcttggtagcgatgtagttccctcatagaccctcagtttccccctctggaaaatggggtgaccagagagtggtggagggagggtgggctgtggctccgccaggctggggctcaggagggcggcagtttggtccatcctggttgttgctgtgccctccatgtctcccacacggctgggccgcgtcggtgctgagccccactgggtgggtgaagtgatgggtgggggaagtgagtgggtggacatggctgttgggaggatgatggggggggtgtttggggatggatggatgggagtctgggcggatggatgggtaaatgctggatgcctgcctgccctctctcctgccctccttccaccaccagggttttttgttttgttttagggggggttctttgagccagaatcttactctgtcacctaggctagagtgcaatggcacaatattggctcactgcaacctccgcctcccccgttcatgtgattctcctgccccagcctcccaagtagctgtgaccacaggcgtctgccaccatgctcggctaatttttgtatttttagtagagatggagtttcaccatgttggcctcaagtgatccacctgcctcggcctcccaaggtgctgggattacaggtgtgagccaccacgcccagcccaccatgagtgtttttttaaaaacatataagtccggggggcagaggttgcagtgagccgagatcatgccattgcacttcagcccaggcgacagagcaagactgcatgccctcacccaaaaaaaaaaaatttttttttatatatattgtggagacaaggtcttactatgttgcccaggctggttggttttgtttttgttttgttttgtttttggagacgaagtctcattctgtcacccaggctggagtgcagtggtacaatctcggctcactgcaacctctgcctcctgggttcaagtgattctcctacctcagtctcccgagtagctgagattacaggtgcatgccaccacacctgcctaatttttgtatttttagtagagacggggtttcattatgttggccagtctggtcttgaacttctggcctcaggtgacccacccatctcagcctcccaaagtgctgggagtacaagtgtgagccaccatgcccggcctaggttggtctgaaactcctagtctcaagtgatcctcccacctcagtctcctgagtagctgggactacaggcacgtgccaccacactcggctaatttttaaataatttttgtagagacagggtcttgctgtgttgcccaggctggccttgaactcctgggctcagacaatccttctgcctcggccccgcaaagcgctgggattgcaggcgtgagcctctgcttggcctaggagtgtgaattaagtccccactcagtgcccaggcctgagccccatgttgggaacacaggagtaagtgacacaaagtccctgcccccacagtgcagagaggctgctggtttttagccgagggtggagttgggcctgcctggtgggggagacagtcacactgccaacagacaaaacccattgtaacatgggctacaaaagcggcccgtgagaagacaggatccagcctccctcccttcttcccgaaggctgcactttggaggaggcacggtggagccacactggccccaggtggcaggaggcagaatagcagcttccaggctctggcctcacttcccgctctgctcttcctcccttacgtgctttggagaggagtgacttcacttcctcgacctcaccttccctttctgtaaaatggggatagcgatagcactgctttggtcggccccagggactcagtgagatggaacaagcacgttcagtacatgggaacaccactgcccaagtattccccttcccgctgttgtgttcagttgcggcctggggctgagggttcagggacttcccctggccctcacccgtcccccccaccctccgccgtgtgtggtctctcccctttccacccgcagtttcctggagcatttgcacaaacaccagggctccgtcctgcaccccgactacaagacggccttcccctcctttgaggacgccctgcatcgcctcctgccctaccatgtctaccagggcgccctcccctcccccagtgactaccacaaaggtgaggcctccccaggacacggccctatatgtcccaggggaccccagcccgtggggcggggcgtcgccagtgtggagccgcaggtccacggtgcgctatgctgaccctgccccgccctccttcctgcgcatccgcggccgcccccaacatctccgcccttgcctctcttcccttcctcgcagtggacgaggagtttgagacggtctccacgcagctgctgaaacgcacccaggccatgctcaataaatatcggctcctgctcctggaggagtcccgggtagggtcagagtcgccttcctcgcctctgggctcctcctcgctgggacactgcccctttccctcacccgctctgggcaaggtggagcctcccgcccctcctagccccgggagggaggttgggagggaggcgggagctcccatcacaaggacagtttggaccttgcacgcatcgtccccgtcgctcgcgccccttcccccttcttgctggttcactcgcacgtcgtcttttcccccaccccagagggtgagcccctcagcggagatggtaatgatcgaccgaatgttcattcaggaggagaagaccacccttgccttggataaacagctggccaaggagaagccgggtgagaggggggagtgagaggggaggggagggagaggtgcccccaccccacctgggcagaagagttagattcagggcggggagtgggtgtgtggccctacctcactccaccactaggcggtgccccagctccaccttcctgctggcagctgtgcctcccctgacctcccgcctctcagaccagatagcccacatccatcttcctccatccctgtgtggcccttccacccccaccactctgggatggggggaatatttctgccacccccgtgggacacaaaacaggagagcaggcgcctaggttgcaaaatatataaggtaacgcccactcttgggtgccagtcctttgcttggggaccctgagagtgagcacctccttaagtgttgcaccttaggtggctcgctggcctcactctagtctcctgtctgcaggaaacggtacaggcagatcccagctgccagagtttccagaatattcccttagcctttgcccacattccaactccagggcttccctggataaaagcatggtccctgctttgtgctgccaggcgcaggctttttacgtcgagctctggaccttaattttgaaaaagtagtcattggtacttaaatgagtgcaaaggggtggccatagtgaaggaggggccaggagcgagtctgaagtctctagggtaggagaggaagggtagttccgtggttaggggctcgatgctggagtcttggtttaaatcctggctctgccacttactaactgtgtgaccttgggcaagttacttaccttctctgtgtctctgtattctcattttgtaaagtgggggttatgatgatcagcttacaatctcttatctgacaccctcggggcctgatatgttctggaatctttttgcttttagaaaggcaatgagctcactccagcctgggcgacagagcgagactccgtctcaaaaaaaaagaaaggcaatgagctacctcaatgctgtcttctgatttacccccagtgggtttggggaagcactgtgtgatcaaacacactagtatttctggagtgaaatcgatgggtatccagagtagttgagataaatcatgaccataaataacctcatgtagccgggtgtggtggctcacacctgtaatcccagcactttgggaggctgaggcgggcgatcacctgtggtcaggagtgtgagaccagactgggcaacgtggcgaaaccctgtctctactaaaaatacaataattagccaggtgtggtgtctggcacctataatcccagctacttgggaggctgaggcaggagactcgcttgaacccaggaggcggaggttgcagtgaggtgagatggcgctactgcactccagcctgggcaacagattgagactgtctcaaaaaaacaaacaaacaaacaaacaaaaaacctcatgtcatttcggaccagattttgaaattagatacctccttagccccatttttaaaaagttatgtatataattagagcagtgctgtccaatagaacttcatattttatttattgtttttttgtttgtttgtttgtagagacaggggtctcactactgtggccaggcaggtctcaaactcctgggctcaagcgatccccctcccttggcctcccaaagtgctgggattacaggcctgagccttgttttgtattctcttaatttacttatgtctgaatgagccccacgtggctcgtggcgctgtgccaggcacagtggttttagagttgggggaatttgggccttgctgaagagggtctcaccaagcctatcctgaggattggagggtccagggtgcagtctggtgcctggcaggtagtaggtgctcactgcacacagctcctcccagctcggtcggggggtcctcatcctaaccccgcgggttttctttgccccgattctgcagacgagtacgtgtcttcctcccgctcgctcggcctccccatcgcagcctcttccgagggtcatcggcttcccggccacggccccctgtcgtcttcagctcccggggcctccacccagccccctccacacctgcccaccaagcttgtgatccggcacggcggggcaggcggctccccttcggtcacctgggcccgggcgtcctcctccctgtcctcctcttcctcctcctcctctgccgcctcctccttggacgccgacgaggacggccccatgccctcccgcaaccgcccgcccatcaagacctacgaggcccggagccgcatcgggctcaagctcaagatcaagcaggaagccgggctcagcaaggtcgtgcacaacacggccctggaccccgtgcaccagcccccgccaccccccgctaccctcaaggtggccgagcccccgccacggccgccaccaccaccgccgcccacgggccagatgaacggcacggtggaccacccgccgcctgccgcccccgagcgcaagcccctgggcaccgccccgcactgcccgcgcctgccactgcgcaagacctaccgcgagaacgtggggggccctggcgcgccggaggggacgcccgcaggcagggcacggggaggcagcccggcgccgctgcccgccaaagtggacgaggccaccagcgggctcatccgcgagctggcggccgtggaggacgagctgtaccagcgtatgctgaagggccccccgccagagcccgcagccagcgccgcccaaggcaccggggaccccgactgggaggcgcccgggctgccccctgccaagcggcgcaagtccgagtcgcccgacgtggaccaggccagcttctccagcgacagcccgcaggatgacacgctcaccgagcacctgcagagcgccatcgacagcatcctgaacctgcagcaggcccccggccggacgcccgcgccctcgtacccccacgctgcctcggccggcacccccgcatccccgccgcccctgcacaggcccgaggcctacccaccctccagtcacaacggtggcctcggcgccaggacgttgaccagataacaccgggccgcctccccttccccgtcccctcctcccgaagacgccgggacagtcgggtgtccgccctcagcctcctggggactcgagccggggatcccctgacggtttttcttgcctaagttatttgagtcacaaaggcctccttccctgccgcctgcttcagctgggttgctggggggtgggcgtggatttagggagggggctgtgatgtaaaacgtctcccctgccaaaggaggggcaaagtgctgtgtcagttcctgtttcttcccatttcctggcacactctgcccctctgtccgggggacacgcgcatgtgtttgccagggatggggccaccgggttgatgccaacgctccgggtgcctgtcttgtctgtgtggcttctcagatggtggagggtgctgggagctggcagggtccttccagacagtctcagcctctccccgccgcccccaacaggctgtcaaacaaaaccggagagggggtgggggagccagcctcccagcgtgctgtgcccgcaggcacccgtgtgacatccgcacgtccagctccgtgacctgtgtgtgtgtgtgtgtgcacaagtgagtgagagatttcgaacgcccacccctcgactttgaaatctgagcaaaacaagaaactggggtcttcctctcccccgaacctctccccagctagtcttccctctgttcttcctgcctccagccgcccgcgccagattttgaaatctcggagacaaaactagtactgtaagataaatttttttgtactgtatttattgtgtataacgatttttttaaaggagaattctgtacatttagaactcttgtaaattaaaaaccgatcctttttttaaaactgtactcatgcccccttggcccattgcttttgggtttgtgagggtgggggagtgtttggatctgggattgtgaggccttcttccgcatgcatctgttgagcacctgctgagtaccaggccccgttctaggctcagggggttcaacatgaacaaggcagacaagagtccctgctaagccggtaagctgacttgttagtggggaaggcgggtggtaaacagctaagccagatcaagccagttcttcttatttccggtaaggttctataatctctgcatacactctgagaattagtgaatactgagccattgcccccagggagacagggttaggtttctaagggcctctgatcaccacagttcagtcaatacatcaccttagtttacatgtgttgctgtttaaaaacacttctttatgtatttttgagacgggctcactctgtcacccaggctggagtgcagtggcacgatcgtggctcactgcagccttgatctcccaggctcaagtgatcctcccacctcagcctcccgagtagctgggattataggcgcaccaccacgcttagctatttttttttttaatctttctgtagcaatgggatctcactatgttgcccaagctggtctggaactccacggctcgagtgatcctctggccttggcctctcaaagtgctgggaatacagacgtgagccaccacgcccagccctaaagataccttatttcatttatattgttgattcattcacattgaagtcatgccaacagcattataactggaacctggagcaagcctatttcacacatatattttatcttttctccaaaggcacatcacagcttcttggtgctttaaggtcactagaccgcacttcagctgtacgcttgggcccattttaaacaatgagtcaccaacaaaaagcacaaaaatgtgaaaagcgtgggactagataaaccaagaaaaggacgcgtgtttatggtacgagagccaaaacgagggcagaatgtcgccttattcaacctcagctgggaacgaacgtctgtgttgggcaacttgatattttgctgccgtgtgtgtgttgagagtcttgacttgggggttacaaagaagttttgatgagcagataaatgcacaaatatggcatttgcaaatagtgagggtccactgtaaatgtatacagtgtcagatgcccatataaagaagaatcaggccaggcacggtggctcacacctgtaatcccagcactttgggaggccaaatcgagtgggtcacctgaggtcaggagttcgagacctgcctggccaacatagtgaaaccccatctctacttataaaaaatatatatatatacaaaaattagctggcatggtggcacacgcctgtagtcccagcttcttcagaggctgaggcaggagaatcgcctgaacccaggagatggaggttgcagtgagacgagactgacactccagcctgggcaacagagtgagactctatcccccgaccaacaaaaaaaaagaagaaaaaaaatcatgctaggtgtattagtcccctcaagctgctataacaaaatgccccaaatagggcagcttaaaacaacagatatttattctcccacagccctagaggcctgaagtctgaaaacaaggtggcatcagggccatgcccactccagaggtgctagggaaggatccttccttgtctctgccagtttctggtggccccaggttctccttggcttgtggctgaatcagtccaatctctggctgacttcccactgtatctcttctcttctaagggcatcagtcatattggagttttgcccatcctaccagtatgcccttgtcataacttaatcatatctgcaaagatcctgattcccttttttttttcttctagctttctttttctttttctttttttgagacagatgtcttgctctgtcgcccaggctggagtgcagtggcacgatctcagctcactgcaatctctgcctccagggtttaagtgattctcctgcctcagcctcccgagtaactgggactacaagcatgtgccaccacgcccagctgattttttgtatttttagtagagacggagtttcactgtgttagccaggatggtctcaatctcctgatggcatgatccaccggcctcagcctcccaaagtgctggtattacaggcgtgaaccaccgcgcccagcccttctagctttcttcagatcacagaccctgattccaaataaaattacattcacaggcactagggttaggacatcagcctatattttgagaggacagaacaactcaatccgtaatgcagggtaaggaggtgggtgtcacaagtgagtgacaattatctgggctggtggtgtgggggtaaaagaatttaccaagacagtggtaggttaaaaaaaaaaaaaaaaaagcagatttatgggctcacgcctgtaatcccaactctttgggaggtgggcggatcacttgaggtcaggagttcaagaccagcctgactaacagtgaaaccccatctctactaaaaatacaaaaattggctaggtgcagtggctcacgcctgtaatcccagcacttcgggaggctgaggtgggtaaatgacctgaggtcaggagcttgagaccagcctggccaacttggcaaaaccctgcctctactaaaaaatacaaaaattagccaggtgtggcggcaggcacctgtaatcccagctactcaggaggctgaggcaagagaatcacttgaacccaggaggcagaggttgcagtgagttgagatcgcgtcattgcactccagcctgggtaacaagagtgaaactccatcgaaaaaaggtaataaataaataaaaatacaaaattagcagggcgtggtgatgcacacctgtagtctcagctacttgggaactgggaggatcacttcagcccaggaggcagaggttacagtgagccaagactgcaccactgcactccagcctgggcaacagagtgagactccatcaaaaaaaaaaaaaaggcagatttatgaaataaagtaggaaaatatattgcaaagttgcaatgggcaacacagccagggagaagctgactgcaaggaaacaaaggcttgctgggggttgtataggatggagttggttttttcatttgctttttagatagagtctcgctctgtcacccaggctggagtgcagtggcatgatttcagctcactgcaacctccgcatctcgggttcaagcaattctcctgcctcagcctcctgagtagctgggattacaggcacccatcaccatgcccagctaatttttgtatttttagtcgagatggggtttcaccatgttggccaggctggtctcgaactcctgacctcaagtgatccgtctgcctctgcctcccaaagtgctgggattacaggcgtgagccaccatgcccggcatataggagagttcatgttgtgtgctgaagagggctttgtgcagtactgataatgccagggttacagtgagctcacttgcaggtgtctggtgatacttgggcgcaggaagattgagttatttgtataggagggctatgtcctggacagtaaagaaaggcagacctgtaacttagctgctttatctttttgctttcctgcattctcagcagcctgactctccctaattaggactccgcaagtgggcaagacagctgtcaggccctagtatgcctttgtgtgaactagaaaagggcacccctctctcctgggcccagaatttgaagagcagagcatgagctgggctccagtcccctctcacccattcagtgagtgccttgtgcagtgaacaacctgcccaactgcacatcagggccctcgggatcaggtgggaagggaaagattctttgaggaggtgatatttgagcagagacatgcaggaaaagagggaggaagccacaggagagctctcagggaagagcatccaaggcagagggaaccgccagtgcaaaggccctgtggcaggagcctgcctggagtgtcgaggaacagcgaaaaagccaatgcggctgcagcccataagtgatggggagaggtctggaggtgaggtccgagggggaacaaagggcacctcatcgtgcgggaccgtgtcctccatggggatgatttcgctgttacactgagacgggagcttcaggagggccctgagcgaacttaggttccccagcaccctctggtggctgtttgcgggaatagacgaggggtaagggtggaaaccaagcgcagcgaggaggcaactgctgtgagtccaggtgggtggttgtggcggctggaccggggtgatgcaccctgtttctctgcaggcccctggaagtgttttgtttgtttattttttggttgtttttaggacacagggtctcggcccagcacagtggcttgctcctgtaatgccagcactttgggaggcagaggcaggtggatcacctaaggtcagaagttcgagactagcctggccaaaatgtcgaaatccggtctttacaaaaaaaaaaaaaaaattagctgggtgtggtggtgtgcgtctgtgatcccagctactggggaggctgagatgagaggattgcttgagcccaggagatggaggttgcagtgagctgagattgcaccactgcttgcacttcagcctgggcgatacagccagaccttgtcttagagagagagagaggcagacagacagacagagagagagaaggtctcactgggtcacccaggctggagtgcagtggtgcaatcacagctcactaaagcctcgaactcctgggctcaaaggatcctcctggcacagccttctgagtaggtgcataccacctcacttggctaatttttattgttttatttttattttttgtagagacaggggtctcactggcctatagcagtcctcccgcatcagcctcccaaagtggtgggattacaggcatgagccatggcaatgggccccctggggttgtatgtgggtgggaaattgatatctggggtctcagagggatggaccatcccctttcctagctctagaactactccctccacgtgtgaaataaagcactataggaaaacagctgtttcttaaaaaaaaaaaaaattttggctgggcggggtggctcatgcctgtaatcccagcactttgggaggccgaggcaggcggatcatgaggtcaggagatcgagaccatcctagctaacacagtgaaaccccgtctctactaaaaatacaaaaaaattagccgggcgtggtgactggtgcctgtagtcccagctactcaggaggctgaggcaggagaatggtgtgaacccgggaggcggagcttgcagtgagctgagatcccaccactgcactccagcctaggtgacagagtgagactccgtctcaaaaaatagataaataataaataaatagataattttttttgagatggagtctcactctgtcgcccaggctggagtgcagtggcacaatcttggctcactgcaacatccgcctcctgagttcaagccattctcctgcctcagcctcccaagtagctggaattacaggcatgcgccaccacgcctggctaatttttttgtacttttggtagagacagggtttcaccatattgcccaggctggtcttaaactcctgggctcaagcgatccaccctcctcggcctcccaaagtgctgggattacaagtgtgagccacttcgcccagcctaaatggctgtttcttaacatccttggatcacaaaactctcggagagactctcctgaaagacccctcctgattactcacaaggactcgtccacaatttccacgggctccgggactcagttctgcaaggctgactgcctgcaggcgagcggaagaacagaacagcagtgaccaacctttactaaacagggaaccgcatgggttagcatatctggtcctcacagcagccccagcgtgggaactaataggcccagcttgcaggtgaggaaactgaggccccaaagatgtagtacatggcagactgggctgtgagccaacctgcctcaatgcattcattagagagagctggctgtggggccagtgagcgatgagtgtatacaatcgctgaaaatatccacaactgggctgggtgcggtggctcatgcctgtaatcctagcactttgggaggccaaggcgggtgaattgcctgagctcaggagttcaagaccagcctgggcaacatggtgaaaccccgtctctactaaaaaatacaaaaaattagccaggcttgttggtaggcacctgtggtcccagctactggggaggctgaggcatgagaatcgctttaacctgggaggcagaggttgcagggagctgagatcgcaccactgcactccagcctgggaaagagtgtgagactctgtttccaaaaaaaaaaaagaaaaaagaaaaaaaaatccacaactgcaaaccgatgaacgcatcagtgattcctctgggtggcggggacccaggtcctgctgatgacgctgtgctttgctgctaacatttgtggttgacagaaactctgaattttagtgaaaactccagctgtctttttccccccacatctaagttcacagatcctccggaatttttttttttttttttttttttgagacggagtctcactctgtcgcccaggctggagtgcagtggtgcgatctcggctcactgcaagctccgcctgccgggttcacgccattctcctgcctcagcccccagagtagctgggactataggcgcccaccaccacgcccggctaatttttttgtatttttagtagagacagggtttcaccgtgttagccaggatggtctcaatctcctgatcttgtgatccgcccgcctcggcctcccaaagtgctgagattacgggtgtgagccaccgcgcccagccgatcctccagaatgttttgcaacaggttgagaagccctggggtagaagtgaaacaagactctcccatcagacaactctggctcaactccgagttcttccacaccttggcaggccaaactctactttctttttttttgagacagggtcttcttctttcacccaggctggaatgcagtggcgcgatcacagctcactgcagcctcggcctcctaggctccagtaatcctcccacctcagcctcccgagtagctgggaccacaggtgtgcaccaccacactcggctaatttttagattttttttatcttgcagagatggggtctcactatgttgcccaggctggtcttgaactcctagcctcaagcaatcccctgccccagcctcccaaagtgctgggattacaggcatgagccactgcacccagctctgagactttacttccttgtatttcaactttcccatctgagacatagcaataataataataataacaataataacaggacttgccctcctgggggaagggagatgatttaggtgatgcttttggaacagggcctgtctcctagcagtaacaacattaacgtaagttatcattaagctccagaccttttatatattatatatataatagtaatattatagtaacatgttattggctgggcctgctggtgcatgcctgtaatcccagctactcgagaggctgaggcacgagaatcgcttgagcccgggaggcagaggttgcagtgagccaagatcgcgccactgcactccagcctgggtgacagagcaagagtctacctccaaaaaaaatagaaaaaataaataaaatgttataattataataatataatatataatatcagttttattgagatataattcagaagccatgcaattcacccatttaaagcatacaattcagttgggcatggtggctcatgcctataatcccagcactttgggaagctgaggtgggtaaatcacttgacgtcagaagttcgagaccagccaggccaacatggtgaaaccccttgtctgctaaaaacacaaaattaggccgggcgcagtggctcatgcctataatcccagcactttgggaggccgaggcgggcagatcacgaggtcaggagatcgagaccatcttggctaacatggtgaaaccctgtctgtactaaaaatacaaaaaattagccgggaatggtggtgggcgccgtaatcccagctactcgggaggctggggcaggagaatggcgtgaacccgggaggcggagcttgcagtgagccgagatcgtgccactgcactccagcctgtgcgacagagcgagactctgactcaaaaaaacaaaacaaaacaaaattagccaagtgtggtggcatgcacctgtaatcccagctactggggagattgagggaggagaatagtttgaacccaggaggcggaggttgcagtgagctgagatcgtgccactgcactccagcctgggcgatagagtaagactgtctcaaaaacaaaaacaaaaaccaaaaccccaaaactcctgtttcttggagatatgatgagggttcgatgagctaatacatgcatgcaaagagctcagagcggtgcctgcacataggaatggctcagtcaacattagggattgtttctacaaatgtttactgagcccctgcagggagttgggcattgtgcaaagccctcacggggctcatgttctcagggcaaagacagtcccttaggcagagaaatgtggaatatgcagagtggttgggagggctgtggagaaaaatagggcagtgataagaggtagagagtgggttctaccttagccagggtgatcctggaggacttctctgaggaggtgacatttgagcagggacctgaaggaggggagagagtgaggcattcagatccctatggggaaagtactccatggagaggagtcagcaagtgcaaaggccatgaacttggagggttgggggtgtgtctgaggaatggtgaggaggccacggcggttggagccgcctgaggaagggggacaggggagatgtaggtggatcatgctaggctttgtgggccttggtgtggacttcggcttttactctgagagagaggagagccagggagggttgtcagctgagaagtttcatcaactcccttaagttttaatattaatattatatttacttatttatttgcgatggattctcactctgtcacccaggctggagtgcagtggcgtgatcttggctcactgcaacctctgcctcctgggttccagtgattctggaacttgggagcctcagcctcccaagtagctaggactacaggtgcgtgcctgcatccagctaatttttgtttatttatttatttttgagatggagtcttgctctgtccccaggctggagtgcagtggcgcaatcactgcaagctccacctcccctgtgtttaagtgattctcctgcctcagcttcccaaatagctgggactacaggcgcccgccaccacgcccagctaatttttttgtatttttagtagagatgggtttgcaccatgttggccaggctggtcttgaactcctgacctcaagtgatccacccgcctcggcctcccaaagtgctgggattacaggcgtgagccaccgcgccccgtcctattattttttttagaggtgaggtctcgctctgtcacccaggctggagtgcagtggcacaatcatagctcactgcagccttgacctcctgggttcaagctatcctcccacctcagctttccaagttgctgggatcacaggtgtgcacccctgtgcctggctaaattattttattatttattattatttttaatagacatggggtctcgctatattgtccaggctggtcttggactcctggcctcaagcaatcttcccaccctggccttccaaagtgttagggttacaggcgtgagccagggcgcccgacctgttattgttactattattgctgctgctgttgtgattcccgtgttaagaagagagacagactggggagcagcccaacgctggaggtggaggcggaattcgaaccccaggctggacgctggagctctcgcccgccgtgctaaggcgtcttccccactccccacaagggggcgccagaggccgggcgcccggttttgaggggggcgcctcgtcccgcccctccctcctgtcctccctcccgtcctccccgctccgggccccacccggctcagacggctccggacgggaccgcgagcacaggccgctccgcgggcgcttcggatcctcgcgggaccccaccctctcccagcctgcccagcccgctgcagccgccagcgcgccccgtcggtgagtgctcccagcaccgcagctgtcgcctcccgacccccgcccaagcctgccctggttcctcatgcctgacccctgctccctgccaccctgtccccagtctgtaacggtctccccaggtgtcccccagtcttcaccagtccccccagtctgtaaccatgtcccccactcttcccactcctcccactcttcctcccactcttcctccagtctttcgcagcctctcacactcccccagtctcctccatcctcccccaacacccctccctatcccctgggctagaagagatcctctctgcagggtctccctccacgccctcatccatatcagctaacttggtccctccagccactcaagagcccctctcctgcctcaccagctccatcggccaccgctgatagcattctccccagctctctctcagggccctccctgcctgggacaccgcccagagccctctccctctgcccacatcccagatcctgcctctcttttccattcttgccactcctttacgaactccttttgcttttatctcccctactccctggccaccccttttaagtctcatgattttatggattttagcatatttgatttgcagttattttgatgctcaaattgccccatgtttggccactgggcacccctgcaagctgggtcctctgtccctgtaacatgccctatcggcctttgagcacttcctcaccttctgacccaggctcacttgttcttccctgcccccgccctggaatccaccatttctctaaggagtcccaggttcttttagtggggaatggtatttagagactcccatctcaccaaaagttgattctttgaaaagatcagtaaaatcataagcatcaacggggagcaatcgtttttgtttttcttttttaaaaaaagcaaatacccacacctgtggctgatatcgggaatgaaagaggggacatcactacagatcctacggtgaataaaaggctagtaagggaagatagagaacacagtctgggtgctggaggtgctcattgctcctgggttggtcatggctaacctccctaactcagatctttagacctataataggattgcaacctctgaggtcaggctgcctgtgtttgagtcccagcttgagcattttccagctaagtgatcttgggtaatttattgctgtcttcctgagcctcctttgccttgttaaaaaagcagagatgagccggcatggtggcacacacctgtaatcccaacaatttgggaggctgaggtgggtggatcacctgagctcaggagttcgagaccacccagggcaacatggtgaaacccatctctactaaaaatacaaaaaaaaattaactgggtgtggtggtgcatgcctctagtcccaactacttgggaggctgaggcaggagaatcccttgagccccagaggtgaaggctgcagtgagctgagattgtatcactgcactccagcttgggctacagagtgagactccatctccaaataaataaataaataaataaataaataaataaataaataaaaagaaagaaaagcaaagcaaagcagggatgataatagacctactttacagggttataaatgttaagtgagttagtacagtacctggcatgcagtgatcataaatgttgcattatttttcttgttaacacccaacagccctcatgacctgggtgcacccaggcaaccttctcagctccatttctcacccctcctctttgtgcccctgtgtctggccacctacccagatgtttcatggctcccagtacaccaggacctttcacatccccagacctttgcacgcaccgtcctctctgcctaaatccccttgtcttgcctgctcttcatggagcagctcaaaagtcaaccctgccctgagtcttactggtgctgtggtctgtttctcatgccctcctctggatgtctggcatgtgtctgggtccttactgggggccctgggtgggtaggggatgatctctggctcatttctgggtccacagtgcctgaagcatggagtgagtgatttcagtgaaaaggtgtcaaatgatggaagggagaagggaggaagaaatgaatgaagcgattaaggaatccgtttcttccaggcagcttctgcatccttcgccttgtccatctcttggtcttccactaccaccatcaatcccccttcttcaaccatgtcaccattaatctttctcctccttcagctggttcgctacgatctccctattttttttgaaatggagtgtcgctctgtcaagtgcagtggcgggatctcggctcactgcaacctctgcctcctgggttcaagtgattctcctgtctcagcctcccaagtagctgggactacaggtggccaccaccaggcctggctaattttttgtatgtttagtagagacaggattgcaccatattggtcaggctggtctcaaactcctgacctcaggtggtccacctgcctcagcctcccgaagtgctgggattacaggcatgagccactgtgcctggcctttttttttttttttttttttgagatggggtcttactctgtagcccaggctggagtgcagcggcatgatcatagctcactgcagcctgcagccttgaactcctgagctcaagcaatcctcctgcctcagcctcccaaagtgctaggactacaggcatgcaccaccatgcccagctaattattttttttgtagagatgggggtctcactattttacccaggctggtcttcaactactgacctcaagcaatcctcctacctcagcctcccaaaatactaggattacaggtgtgagccatcgcgcctggcccaattccattcttcctcctgccacctgccatccatgctctgtgaccacatatttgtgaccacaaatatctgtgctcctcctcctcctccacccatcctgtcacccagacagtctacactcagacccctttcttcctccttggctgggccgcctatgctcatgccctctccccctcccacaggcagctctccatctgcacgtctctccgtgaaccccgtgagcggtgtgcagccaccatgttcagctggctgaagcggggcggggcacggggccagcagcccgaggccatccgcacggtgacctcggccctcaaggagctgtaccgcacgaagctgctgccgctggaggagcactaccgctttggggccttccactcgccggccctggaggacgcagacttcgacggcaagcccatggtgctggtggccggccagtacagcacgggcaagaccagcttcatccagtacctgctggagcaggaggtgcccggctcccgcgtggggcctgagcccaccaccgactgctttgtggccgtcatgcacggggacactgagggcaccgtgcccggcaacgccctcgtcgtggacccggacaagcccttccgcaaactcaaccctttcggaaacaccttcctcaacaggtgtgccagccgcgagcccagggcgcatctttctttttctttttgttaagacagagtttccgctcttttcgcccaggctggagtgcagtggtgcgatctcagctcatggcaacctccacctcctgggttcaagcaattctcctgcctcagccacctgagtagctgggattacagacacccaccaccacgccaagcgagtttttgtattattaggtacagttggggtttcaccatgttggcctggctggtcttgaactcctggcctcaagtgatccacctgcctcagcctcccaaagtgttgggattacacgagtgagccactgcgcccggccctgggggcacgtctttctgtcccaggggtgcatcttgctgtcccccttctctgtcccctccctgactgtgtttccctccttctcagccccaattcccttctctctacccagttcttcccatgcctgtctctgctctcttatccaggggagcacctaggctagtgaagtcagtatgcctggttcaaatcccggccagctgggtggcctcaggcaaatgacttgacctctctgcccttcttgtagcctcatctgcaaaaatgtggatcaatcaccttgggccaggcccggtggctcacacctgtaatcccagcgctttgggaggccaaggcaggtagatcacttgaggccaggagttggagaccagcctggccaacatggtgaaaccccgtctctaccaaaaacacaaaaaattagctgggtgtggtggttcgtgcctgtaatcccagctactcgggaggctgaggcagaagaattgcttaaacctgggaggcggaggttgcagtaagccgagaccgtgccactgcattccagcctgggcaacagagcgagactctgtctaaaaaaaaaaaaaaaaaaaaagggatcaggatcaccatggtctctatgccatggttgctgtgaggacttggaatagcacctggtggccgggcgcagtgtctcacgcctgtaatcccagcactttgggaggctgaggcgggcagatcacttgaggccagaagtttgagaccagcctggccaacatggtgaaaccccgtctctactaaaaatacaaaaattagctgggtgaggtggtgcccacctgtaatcccagctactcgggaggcttaggcaggagaatcacttgaactcgggaggcggaggttgcagtgagctgagatagtgccattgcactccagcctgggcgacaacagcaaaactctgtctcaaaaaaaaaaaaaaaaaaaagaacagtacctggcacaaattaagtgctcactgaacatgagctgtggctggttataactctgagatggtcctggttgccctttttctgtccggtgtctttcttcgcccataaaggatgctttgccatgcggtcccgagtccctcttcatgttttcttcgtgttttccctccttctgtccttccctgttgacccctgaccctccctctgcccccaggttcatgtgtgcccagctccctaatcaggtcctggagagcatcagcatcatcgacaccccgggtatcctgtcgggtgccaagcagagagtgagccgcggtgagtggggccagaccctggggtctgagggaggaggggctggggcctggactcctgggtctgagggaggagggactgggcccggactcctgggtctgagggaggaggggctggggtctggactcctgggtctgagggaggaggggctggggtctggactcctggatctgagggaggaggggctgggcccagactcctgggtctgagggaggaggggctgggggcctggactcctgggtctgagggaggagggactggggtctggactcctgggtctgagggaggaggagctggggcctggactcctgggtctgagggagaggggctgggcctggactcctgggtctgaggtaggagggcctggggtctggactcctgggtctagaggaggaggggcggtgtctccgctgggacttgggcctgtgtcctctggccctggctggcggggcagccgcagggagctagtggaagctgtgactgctccatgctggctcgcattgatgggtgggggaggtgtgtgggtgaccacgtggtgggagcgggcaggagccgcacgtctgggcaggcaggaaggatgggaagggagagatgaagagggacagggattccgaggcagtgagacagcgacgcagggagacacaaggcctggagatgaggcagagcctgggcaggggaggcagagcccgggcaggggaggctgggccctgcgagctcctggctctgcgtctgggccacagatggggccgagaaggggatgggaagggaatctgggtgggggccaaggccaggcctggaatttataaacagctgtgcaaggagagtggcggggggtggattccagccggggcctccgggcgtgctgagccctcaccacccctgcccagcccagctcagcatctgtggtcccccagccccacagatctgtgtcccccaccccccatggccttggaggcccagaactggggcaaaggaggctgctatgtggggcagagaggatgggaggccctggcgagaaggctgggcctggggtggggtggggacgctgggggtgaccatgtctctggctgccgtccagaggccccacgggagaaaggcaggaggcagctgcagaaacgattgggaggacacgctgccagctgagggggaggaattcctggggctcccaccccagggcctggacctgggacagcgggagggagaggctctctcagccagggcaggggtgccggcaggggggttcaaaggccatgggtggtgggggagtggggaacggggtctccctccctggccttgaggatagaggaagaggaggagagagtgtccagctgttggtgtgtatatgtgtgtgtgtgtgtgtgtgtgtgactttgtgtatatcttgggaaagtgtgtcattatgagtgtactcctgggtgtggtggttccacgcatttgtgtatagcagtggacgtgcctcattgtggccatggctctgaggttgtatgactttgaattgtgtacatgcctctgtgtgtgtgtgtgtgtgtgcgcatgtgcctataattgtggctggaagactttgttttgtttgtttttgagacagagtctcactctgtcgcccaggctggagtggagtggcgcgatctcggctcactgcaacctttgcctcccgagttcaagtggctctgctgcctcagcctcctgagtagccaggactacaggcgcccgccgcacccatgtccggctaatttttgtatttttttttagtagagacgggatttcaccatgttggccaggctggtctcgaactcctgacctcaggtgatcctcctgccttggcctcccaaagtgctgggattacaggtgtgagccaccatgcccggcctgctggatgactttgtgtgactctgaagggctgtgtagggctatgagagactttgtgggatagtgtgcaactgattctgtccctatatactgttatattgtgacgtgtgtgtgtgagagagacagacataaagggcaacttttgtctatgtgtctatgtggatttagtgtgtatcattgtaggtgtgagtctgacattgtgtgcctgtgtgtgagatggtctaggcatatatgtgtatctgggctgtgggctgtgtgtgactttgtgtggctgcatggggcggtcagggctgcggggattttgtgggactgtgtgtgactacctgtgattgtatctccggatacagttgtgtgcttctgtgtggtgttgtgtatgtgagaatgtgtgtgtgtgcaggagtgcatcttttgtgtaactgtgtgtgattacgtctgtgtgtgtgcctttggatttgggagggcatgggaggttatgtgtgtgcgactgtgtctgtgtgggtgtgcatgcatgtgtgcctctgtacctgtgtgttcgtgcaggtctctgtgtctatgccgtgtgtgcatctcacattatctttgtgattgtgtgaccacaaacatctgtgtaggtcccagattgtgaacacgggtatgtctgggagcctgcatcttgtagtaattggctatgtttgtgtctggatgtgctactgggggtgtgtgtgtgtgtgtgtgtgtgtgtgtgtgtatgcgagctcatgtgtgtggctgcctctgcatgtaagatgtgtgaacacacgcatgtgtgattgtagcatagtaaagccctcaaatctgggctctgctacttttatttatttatgttatgctacttttttttttttgagatggagtcttactctgtcttccaggctggagtgcagtggtgcgacctcggctcgctgcaacctccgcctcctgggttcaagcaattctctgcctcagcctccggagtagctgggattacaggcgcctgccaccatgcccggctaatttttttgtatttttagtagagacggggtttcgccgtcttagccaggcaggtcttgaactcctgacctcgtgatccacccacctcggcctcccaaagtgttgggattacaggcatgagccaccgcccagcctattttctgctgcttttaaactgtgggaccttaggcaagccacttaacctctctttgcctcagttttcttacctgcaaaatgggaataatgggctgggcgcagtggttcacgcctgtaatcccagcagtttgagaggccaaggtgggcagattacctgaggtcaggagttcgagaccagcctgggcaacatggtgaaaccctgtctatactaaaaatacaaaaattagctgggtgtggtggtgcttgcctgtaatcccacctactcgggaggctgaggcagaagaattgcttgaacccaggaggtggaggttgcagtgagccgagctcatgacactgcactccagcctgggcgatagagtgagacttggtctcaaaaataaacaaacagaaaaacaaaacacacacacacacacacacacacacacacacacacacacacacacactgggaataataatactagcggcctcatagttgtcctaaaggttaaattagttaaaacatacaaagcacttagaaggtgcacacttgtgtgtgcacacagtaggcgctatggaagtgccaacaatgcctgttttcgctgggtgagtgccgttgtgggcccaaggttcctttttgccacgtctcccatcccacactgactcaacctctctcccttcttccctccccgccccatgagacacactttccgaatctgggccagtatgtgtgtttgtggagacaccgggagggagggggggctccagttgctgtccctccagtgacttggcccttcctcccccaaaacaacggcccccaaccccatcccggtccctgcgttgcccgcaaggaggctgcttcctctcaggcaggatgggtgcaagcaccagctccccggaggagcataggggcccatgggactcctcttctgtcgcctcttacctgtgtgtcttgagtaagtcccctaacttctctctctttttttttttttgagacggagtttcgctcttgttgcccaggctggagtgcagtggcaggaccttggctcactgcaacctccgcctcctgggttcaagtgattctcctgcctcagcctcccgaatagctgggattacaggtgcccaccaccacacccagctaatttttttgtatttttagtggagacggggtttcactatgttggtcaggctggtctcgaactcctgacctcaggtgatccacccgcctcagcctcccaaagtgctgggattgcaggcgtgagccaccacgcctagctagtcccctaacttctctgtgcctcagtttcctcatctggaaaatggggtcagaacagtgcccacctcctggggttgttgtgaagagtcactgagtgagctctagctggagggcatgaagtcagtaaatcagggctagctccttgttctgccagttaactcttcgtcctccgggttcccactctgccttccctcctcctggaagtcctccttgacccccaggctgggggttgggtcaggcactggccctgggctcccacagctccctggatccccctgcccaccctgggctgaccactcaggggccaggtctgtgtccccagtgggctgagagatgtaaggacaaagctgaaactgcctcagcctccacacacacagcagggaccacagagggtgcttcccagtgggtgacatcaccatgacttgctgagtgcttaccgtacatccagcactgtttttaaaaaaacagtttcattgaggattaacgtacacgccataaaaactcaaccattatggccgggctcagtggctcatgcctgtaatctcagcactttgggaggctgaggtgggcggataatgaggtcaagagatggagaccatcctggccaacatggtgaaaacccatctctactaaaaatacagaaattagctgggtgtggtggcacctgtaatcccagctactcgggaggctgaggcaggagaattgcttgaactcgagaggcagaggttgcagtgacctgagatcgcgccactgcactccaacctgggcgacagcgagactccgtctgaaaaaaaaaaaaaaaaaaaagctcaaccatttttttttttaaagagacaaggtcttgctctgtctgcaggctggagtgcaatgacgcaatcatggctcactgcagcctccaactgctgggctcaagtgatcctcttgcttcctcctcctgagtagctgagactacagatgcatgccaacatgtgtggataattttttattttatttttttctgtagagacagggtcttgtcatcttgcccaggctggtctcaaactcccaggctcaagcgatcctcctgcctctacctcccaaagtgctgggattacaggtgtgagccactctgtctggccacttccatcatttttaaatgtacagttcaatgccaggcattattttaagctctttatatatattagctcatttatattcttttaatcttcacaacagtctttttttttttttgagacagagtctcactctgtcgcccagactggagtgcagtgatgctatctcggctcactgcaacctctgcctcccaggctcaagcgattctcgtgcctcagccttctgaatatgtgggaccataggcatgagccaccaacaccgggctaatttttttgtatttttagggctaggctggtcttgaactcctggcctcaattgatctgcccacttcagcctcccaaagtgctgggattacaggtttgagccatcacacctggcttcacaacagtcctatgatttgcattttacagaaaagaaaacacaagttcagagaggttaagctacttgcctaaggtcacacagtggatgggggcagaggagggactcaactccaggtcttccagacagctaagtcagggggtctcaatcgcttctctctgctctcctcagcattgcttgttggtgaataaatgagtgaagaagcaaaggtgagaatgagtggatgaaggagtgaatgaggaaatgaatggtgaaaggaatgaatgaatgagcatgggaacccatggctgggatgggtgcttcataagagcaagaatcttgtctgtgtgttctctgcggtatcccaggctcccaggacagggcttggcacacatgagactctcagtaagtattgctaaataaatgcaaaatatttaacttctcagcctggccaacatggtgaaaccccgtctctactaaaaatacagaaattagccagggtggtggtgcatgcctgtaatcccagctactcgggaggctgaggcaggagaattgcttgaacctgggaggtggaggtggaggttgcagtgagccacattcatgccactgcactccagcctgggcgacagagtgagactctgtctcaaaaaaaaaaaaaaaaaaaaaaaaaaaaaaaaaaaaaattatcatctgctatggcaagagcacagctatccagcatgaactctagttgctggatcgtggggagatacaacaggtcctggggaggagctggggtgatagaggcatgtggcaggcttgggggttccatagaagcacagggggatctcttagcaaacatgtcagtatttttaacaacctatatgtacataccgacgcacacctgtaataactgcttaatgaatgagcaaatgaaaaaatggaggccgtgaggctgggcgcggtggcccacgcctgtaatcccaacattttggaggctgaggcaggaggatcagttgagctcaggagtttgagactagcccggcagcccgggtaacatagtgagatcccatctctactcaaaaaaaaaaaaaaaaaaaaaaattagccaggtgtggtgatgcgcgcctgcagtcccagctactagggaggctgaggtgggaggatcacctgagctccgggaagcagaggttgcagggaggcgtgatcccgccattgtgctcgagcaaaggaaaagggggatgattgccccctgtagccagatggcttgaggggctggggccagagcgaggggggaaattctgggcactggagagccagagcagtagtgcccactgagggccttggctattttgcccagacaggatttggacagccaacaacgtgaacatctttacagtccaatatgcaagagaatgggatactactgagaatggctggagggtgggggtctgatttctgccccttgcgcccctgtctctccactcccactccaggctacgacttcccggccgtgctgcgctggttcgcggagcgcgtggacctcatcatcctgctctttgatgcgcacaagctggagatctcggacgagttctcagaggccatcggcgcgttgcggggccatgaggacaagatccgcgtggtgctcaacaaggccgacatggtggagacgcagcagctgatgcgcgtctacggcgcgctcatgtgggcgctgggcaaggtggtgggcacgcccgaggtgctgcgcgtctacatcggctccttctggtcccagcccctcctcgtgcccgacaaccggcgcctcttcgagctggaggagcaggacctcttccgcgacatccagggcctgccccggcacgcagccttgcgcaagctcaacgacctggtgaagagggcccggctggtgcgagtgagtagtcctgagggctgggcgcgcattcttggaggaggtttcctcggtcctctcctaccagtgctgtgagtccctgacttatcagggcccaggttagttagttctcttgaagttgggtcattctggcacagagtgaagccgggaggaagaactgtatggagagactcattcctctgcctttggatttctgtgtcaactccgtgtcaccctggcttctctgtcctggtatttctatttcttcttcctcttcctcctcctcctccttctcttcttcttcttcctctttttcttctttcttctctctttcctcctcctcctcttcttctccctcctcctcctccttcttctctttcttcctccccttcctccttccttccttccttcctctgttcctctctcccttcctccctcctcccttcctccttccttacatcctctttcgttccctcttcttccttcttttttaagagatggagtctcgctctcttgccctggctggaatgcaatgatgcaatcacagctcaccacagccttgaactcctgggctcaagtgatccttcctccttagcctgccccaagtagctgagaccacaggcacgtgtcaccacgcccagctaattttttattttttgtagagtcgaggtcttactgtgttgcccaggctggtcttgaactcctgccctcaagtgatcctccccttttggcctcccaaagtgctgggattgcaggcatgagtatgttgaatttttgaacttcctataaaatatagacagacaaatactcattattctaccctctttattttttgataatttataagattgtggttcaaaggtttccaagttcattggtttattccacaaatatttctttttcttcttcttttctttttttgagacggagttttgctcttattgcccaggctggagtgcaatggcgtgatctcggctcaccacaacctccgcctcctgaattcaagcgattctcctgcctcagcctcccgagtagctgggattacaggcattcaccaccatgcccggctaattgtgtatttttagtagagtatttttagttggtcaggctggtcttgaactctcaacctcaggtgatccgctctccttggcctcccaaagtgctgggattataggcgtgagccaccgcgccaggcccacaagtatttctggaatgctttctgtacacatggtgctggggctggggatggagggaacagacaaggttccagccctcctggggctcatctttttttaaatttaattaattaatttatttataagctagtcaaatttagcagtgggggtggggagttgcatgccaactttactgacactaataagttctgataaccaaggccaggtgcggtggctcacgcctgtaatcccaacacttttggaggattgcttgagcccaggcattgaagaccagcttgggcaacatagtgagacaccatttctattaaaaaaaaaaaaaaaagttctgataacccactaccattggaccagccccggggcttatcttttgatggagggagacagaataagtaaacagacataaaataacaatgaaggctgggtgcggtggctcacgcctgtaatcccaacactttgggaggccgaggggggagcagatcacttgaggtcaggagttcgagaccagcctggtcaagatggtgaaactgcgtctctactaaaaatacaaaaattagccaggtgtggtggcgggcacctgtaatcccagctacttgggaggctgaggcatgagaatcacttgaacccgggaggcagaggttgcagtgagctgagattgtaccactgcactccagcctaggcgacagaacgagactctgtctcaaaataaaaaaaaaaaaaaagatgaatttattacatcttaggcgcttcacagcacccgtctcccatgactcttgtttgattgtggccacagattgtccccttctctcactcctttcctctgtcctcatctcccattcccttcccagcgtcccctgcacttcacgctggtggcctcagtcctgtgcacttgctgctccctcttcctggaaacctcttctgccttcttccccctcccacctggccatccacaaggctcactccctcctcacccctttcaagactctgctcaaatgctcccttctcaggaaggctgtccatgccctcctttgaatgaatataacttcccccatatgcgtccttctttaccctaaccctgttgtcctttcctttcctttcttctcctctcctctcctttctctctttctctgtttctctttctctctttctttctctttctctttctttttctttctttctttttttttttttttgagacagggtctccctctgttgcccaggctggagtgcagtggtgcgatatcagctcactgcaacctccacctcccgggttcaagcgattctcctgcctcagcctcctgagtagctggggttacaggcgtgtgccaccacacccagctaattttttgtatttttagtggagacggggtttcaccatattggtcaggctggtctcgaactcccgacctcaggtgatccgcccgccttggcctcccaaagtgctgggattacaggcgtaagccaccacacccagccaatcagggctctttgaattccttcactgatttatccccagtgcccggaacagaattggtgctctgtaaatatttattgaatgaatgacattgaacaaacagttgcattgaacaaaatctcctctatgcctggcctggtgttgggtggtgcaggagacacaacagtgaccacgatggttccagtcctgtcctgctggggctcccagtcctaaataatgaaggcagttccagggctcagtcctcactggggctcctggagaggagacagatccatccccaggcaccgatgacccagtgtggtcagagctggggcggggtagctggggcaggcagagagggcttctttggaggagagggcatctgaggggaaatgtcagtgttgaacccagtgtagacagtgtgctaactcaattagaggctgaggatgtggctgagatcagaggtggtgtgggctgtgtccgggaatctgtgctttgtccctagggcactggggagccatgaaaaagttcggagcagggaaaggagataattagactcaagctaccttttggagggtggattcaaggcaggagagtctaggagcctggagaccaggcaaaaggcttggaggttcctggatcaggacaggccttggggagggagaggagaaaggagagcgcgggtttcagagcgattttggatgtcagatggaactttctcagggggaggctgccagggtggaggcggggcaggaagctgggcaggcagggaggccaagaaggttctagggggtggaggagcctgaggtgttggtttaaggagcagcgagagtgggtgagtcagagcccccacccccaccccaggaatcctccttcggagggagcggcccactgtggaccaggctgccactcctggaaccttcggaattcaccttgcgctcctctgcccaggcggctctgcagtgtctctctctctctttttctgtctctatgtcagtctcctttctacctctctctcagtctctttcttctccatttttactttttcttttattctaactccctttccttttctttctcgctctgcctcctcctgtctctccatctctcccccgctccgccgccgccctctctctgtcttcctcctggtcttgcttagactcccccaggttcgttcccgcgggtcccttggcgggagctggagcacaaggcccagggacagaggggtgggtccgggccagacacctggtgcccccgccgggctgggggcggctccggaaacccagacaaaccccggagtcagggacccagccccggcccagcccgccctctcaccttatctcttcctggcaccttcccctgcttcctctctggaaaagccatcagcgccctcccgcctaccctcctttggtccctacggagccgcccttcggccctgccccctggctccattggcccgctctcacaggccccgcccccagcccggccacacccctgccctgattggtccttcagaccattaggcactccctccccctcttcctgcaggttcatccatggctccccagtgccgttcaggacacaggagcatgggatttagggtccgctgtgaccaaggctcactgcccctcctttgccccgtgtcgcacccccacccctgctcctcacatatgagtccgccacacttggtcgtcaccaacaatagccatactgttaacctcccctcatgctctcctccaaagataccaggccttcctggactctctgggaggaggcattcaccctcctcccagtgcctcagtttcccatctgtacgatggagggtgtggacgaatcctctggctctaagtcctttggctgaagtgatagctgttagaaggggagattttatgatgctgtgatacgtaaggccaagatcttgggagggtctgattctatagacgccaagatgccctgaaccttcagaccacattctctgcagtggcccagtgacattcattcagcagttgccgatcgcatgtggtactcctctaggctctggggatacagcagggaacacagataaattccttttctcatagaattactttttagtggggaagcaaacattaaacaaatcaatggttatgaagaaaaatgaagcggaggaaagaggggctggcgagggactattttagagcgctctgaaggagaggaaggggtaagaggaaggggtgagccgagtggcgatcgggtggaagagcagtccatgcagtgagaacagcatgtgcaaaggccctggggcagccatgcacttgatgtgtttgaactgagagcctaacggggctggagacagggtggtggtggaaggtggaagagatgaagatttagaaccagtcagggaccaccaacgttctcagcagtctaaatttgtgattctttaaaaaaaaaaaaatatatatatatatatatatatacatatatatataatttttttttttttagatggagtctctctctatcacccaggctggagagcagtggcatgatctcggctcactgcaacctctgcctcccaggttaaagtgattcttgtgcctcagctttccgagtagctgggactccaggcaggtgccaccacacctggctaatttttgtatttttagtagagatgggttctcaccatgttggccaggctggtctcgaactcctgacctcaggtgatccgctggcctcggcctcccgaagtgttgggattacaggcatgagccactgtgcctggcctaaaagaattttttaactagtcttttttattgaacatttaagaccatctcatggaaaggcattcatactttatcagacatgattctcccacacctcaccccaccagctcccagggcctcttttctagaggcaacccccataagtagtttcttgtgtgtctttccagatatactgcattttttttttttttttttttgagacggagtctcgctctgtcgcctaggctggagtgcagtggcatgatctcggctcactgcaagctccgcctcccgggttcacgccattctcctgcctcagcctcccgagtagctgggactacaggtgcctgccaccacgcctggctaattttttgtatttttagtagaggcggggtttcactgtgttagccaggatggtctcgatctcctgacctcatgatccgcctgcctctgcctcccaaagtgctgggattacaggcgtgatatactgtaatcacgcccggccaatatactgcattttgtaaaagcatttatttattattattttgttttgagactgagtctcactctgtcgcccaggctggtgcaatggcacggtctcagctcactgcaacctccacctcccaggttcaagtgattctcctgcctcagcttcccatgtagcttggattataggtgggcaccatcagcccggctaatttttgtatttttagtagagatagcatttcaccatgttgtccaggctggtctctaactcctgacctcaggtgatcgacccgcttcagcctcccaaagtgctgggattacaggcgtgagccaccgcgcctggcctatttattcatttttttagagacaaaggctcgctgtgtcgcccagactggagtgcagtggcgacatcatagctcacttcagtctcaaacctctgggctcaagtgatcctccctcctcagccccggcaattcactgggactataggcgcgcgccagtacacccaactagttttaaaatttttttttagagaccaagtcttgctatgttgcccaggctggtctcgaacttctggcctcaagtgatcctccccccttggcttcccaaagtgctgggattataggcatgagcaatatttaatttgtgagcttcctataaaatatagacataccaatattcattattctgctctccttgtttatttttcgataatttataagattgtggaccaggtgtggtggctcacacctgtaatcccagcactttgggggaccaatgtgggcggatcatctgagatcaggagttcaagaccagcctgaccaacatggagaaatcccatctctactaaaaatataaaattagctgggcatggtggtgcatgcctgtgatcccagctactcaggaggctgaggcaggagaatcgcttgaacccaggaggcagaggttgcagtgagacaagatcgcaccactgcactccagcctgggcaacagagtgaaaccccatctcaaaaaaaaaataaaaaataaaaaataaaaagattgtgtttcaaaggttctcaagttcattggtttattccacaaatatttcctgagtgttttctgtacagattgtactggtgctggagatggagggaacagacaagtttccagcccttctggggctcctttttttttttttgagacagtgtcttgctctgtcacccaggctggagtgcagtggtatgatcatggctcactgtagccttgacctccccggcttcagtgatcctcccatctcagcctcttgagaagagaagattaataaatcaagacattaggccaggcgcggtggttcatgcctataatctcagcactttggaagactgaggcgggcggatcacaaggtcaagagatcgagaccatcctggccaacatggtggaacccagtctctactaaaaatacaaaaattatcatggtggcgggcgcctgtagtcccagctacttgggaggctgaggcaggagaatggcgtgaacccgggaggtggagcttgcagtgagccgagattgagccactgcactccagcctgggcggcagagtgagactctgtctcaaaaaataaataaataaataaataaataaagtcattatttgcaccactgcactccagtctgggtgacagagcaagactctgtctcaaaaaaaaaaaaaaaaaaaaaaaatccactgtccatttgggagaaaaaaagagtgaagaaagcaaaaagcgaataacgtcttagtattgttcttaaaataattttgaccacaggaacccccgaaaggatcttgaggacccctgggtttccctggaccacacttcgtgaattgctgctgtagggctttgtcggcttcggtagaaattttgaacttcaataagcaaatagagagttatgagcagcatcccctgggctcatgttccttcctgaaaaatgccctcttgggccactgctgcatggagcaagggttattggggcaggatggggagctgggagacctgtcgggccaccttgggtgtctccccaggcaagagaggatgacgctcgaatggacatggtggccactgaggtggagagaaatgagaagcaggggagaggctgggcgtagtagcgggtgcctgtagtcccagctactcaggaggctgaggtgggaggatggattgagctgggaaggtggaggttgcactgagccgagattgtgccactgcactccagcctgggggacagagccagaccctgtctaaaaaaagcaaaaaagaaaaggaaagtaggggagagagggagagacataggaggaggcaaaagggactcattgataggttggatgtggctacttaacaggaggaagaatcaaatatcaaatcaataatgatttcaagagctgggtaccgtggctcccgcctgtaatccagcactttgggaggctgaggcaggcagatcatttgaggtcaggagtttgagaccagcctggccaacatggtgaaaacccctctctactaaaaatacaaaaattagtggtggcgggcacctgtaatcccagctactcgagaggtagaggcaggaggattgcttgaacccaggaagtggaggttgcagtgagccaagatcatgccattgcactccaccctgggcaacagagtgagactccctttcaaaaagaaaaaaaaagtgatttctagagccggacggggtggctcccgcctgtcatcccagcactttgggaggccgaggcgggtggatctcttgaggtcaggggttcgagaccagtctggccaacatggtgaaagccagtctctactaaacatacaaaaattgaccaggcatggtggcacgtgcctgtaatcccagctactcgggaggccagggcaggaggattgcttgaacccggaggtggaggttgcagtgagacaaggttgcgccactgtcctccagcctgggtgacagagtgagtgagactccgtctcaaaataaataaataaataaaaataaaatttctagatttctggcctcaactgggaaggcagggctggggatgcccttttcagagatgggcacagctgagggcgacacagctctgagggctaggctcaaattccacttagggcatcctggtatggagctatccaggaatgttgacagggcaattagctctgagtcctgagctggagggagaggcttaggctggtatgcagattcgggagtggacctcttggaggggtgtttaaaactgggagggactcagctcacttagttagcagagaggaggagcccagggtgagccccagcaggaggaggccatgaggctcacagtgtggcacctccgcctgcagcacctgtaacttgtcagaaatgcaaattcccatctgggcagtggctcttgcctgtaatcccagctacttgagaggctgaggcgggaggatcccttgagcccaggaatttgaggctgcagtaagttatgatcgcaccactgcactcctggctgggtgatagagcgagaccctgtctccaaaaaaaaaagaaaaaaaagcaggccaggcgcggtggctcatgcctgtaatcccagcactttgggaggccacggcgggtggatcacctgagattaggagttcaagaccagcctggccaacatggagaaaccccgtttctattaaaaatacaaaaaaattagccgggtgtggtggcgcatgcctgttaatcccaactacttgggaggctgaggcagaagaattgcttgaacccaggagttggaggttgcagcgagctgattgcaccactgcactccagcctgggcaacagagcgagactctgtctcgaaaaaaaaaaagactgggcacggtggctcacacctgtaatcccagcactttgggaggccaaggtgggcagatcacgaggtcaggagtttgagaccagcctgaccagcatggtgaaaccccatctttactaaaaatacaaaaattagctgggcatagtggcgcatgcctgtaatcccagctactcaggagcctgagacaggagaattgcttgaagccgggaggcggaggttgcagtgagccgagattgtgctactgcactccagcctcggtgacagagcgagactccgtctcaaagaaaaaaaaagagagagagagagagaaaaagaaataaaagaaatacaaattctcatgccccagcccagaccaagtaaatcagaatctctgggagtggggcctgcagcctgtgttttaacaagctccctggtggaccctgatgcaggctgaggtgagaacccttcccacaggttcacgcttacatcatcagctacctgaagaaggagatgccctctgtgtttgggaaggagaacaagaagaagcagctgatcctcaaactgcccgtcatctttgcgaagattcagctggaacatcacatctcccctggggactttcctgattgccagaaaatgcaggtgggaagctgcccaggagggaatgttgggggtgggtgatgggaaggttggtttctggaagctctgagatgggacctcaaaagccagagggatggatggcaggttctggaaagcgcctccctcaaatagttccgtgggagcatggttttatgagtcaggctaggggagtgaagagaaaacccaaaataacagtggctaaattaagatagagagtttttctttctttcctccataaaaagtcccagaaagtgatccaggactggtttggtgctttacagagccagggatctagtccccttctgtcttatttctcttccatgcctggcctccaggcccaaggaacttcatggtacaaaagggctgtgaaggctccagccattgtgtctgcgttccagccagcaagaagttgggaagggggccaggcatggtggctcacgcctgtaatcccagcactttgggaggccgaggcgggcggatcacgaggtcagcagatcaagaccatcctggctaacacggtgaaaccccgtctctactaaaaatacaaaaaattagctgggtgtggtggtgggcgcctgtagtcccagctactcgggaggctgaggcaggagaatggtgtgaacccgggaggcggagcttgcactgagccaagatagcgccactttactccggcctaggcaaaaagagcgagactccgtctcaaaaaaaaaaaaaaaaagaaaaggaagttgggaaggggaagaaaagagtagtctctttaagaacactgtttattttattttcatttatttatttgagacttaaatatttatatttgtaaaatataaatatttaaaatatacacagctgggtgcagtggctcatgcctgtaatcccagcactgtgggaggccaaggcgggtggatcacctgaggtcaggagttcgagaccagcctggccaacatggtgaaaccccgtctgtactaaaaatacaaaaattagctgggcatggtgttgcgtgcctgtagtcccagctactggggaggccgaggcaggagaatcccttgaacccgggaggcagaggttgcagtgagctgagatcacaccactgcaatccagcctgtgtgaccgagtaagattctgtctcaataaataaataaataaaataaaatatatacgtttaaaaatttatttatatattttttagagatttatttatatatttttcagagactctgttgtccaggctggagtgcaatggggtgatcatagctcactgtgtacttgaactcctgggctcaaaggtccttctgcctagcctctagagtagctgggactacaggcacatgccaccatgcctggctagcttttttttttttttttttttttgagacagagtctcactctgtcacccagaccgaactgcagaggcgtgatcttggctcactgcaacctctgcctcctgggttcaagcagttatctcacctcagcctcccaagtagctgggcctgcaggcatgtgccaccacgtacagataatttttcatacttttagtagagatggggttttgtcatgttggccaggctggtctcgaactcctggcctcaagtgatcctcctgccttggcctcccaaagtgctgggattataggcaggagccaccatgcctgaccaagaacactttctagaacagagctgtccagcagtacgttctacaatgatggaaatgtttcattctgcactgtccagtatggtagccactagccacattcaaatggaatgttaacgtgtatttcttttttctttttttttgagatggagtcttgctctgttgcccaggttggaatgcagtggcaagatcttgactcactacaacctctgcctcccgggttcaagcaattatcctgcctcagcctcccaagtagctgagattacaggcatccgccaccacgcccagctaattttgtatttttggtagagatggggtttcaccatgttgtccaggctggtctcaaactcctgacttcaggtgatcctcctgccttagcctcccaaagtgctgggattgcaggcatgagccactgcgcccggcctgtatttcattttaattaatgtaaataagcacatgtggctagtggctgccatactggacaggctaacagtagaagctgcacatgcaacctgtgcttgcctcagtggacttgaacttagtcatactctggctgccagggaatccaggttgcaacctaggatccccaacccttcagagtcgtgatcagctggcctctctgccttggctcaggaaattcacatagggctgtgaaaggaatccattttcgcagagactgtcctggtgcagtctgggccacttagagtagcccgtgtgagaagcagtgtgacgccaagtccacccctacaccccaaagtgacttcttcggtggggagggggtggtcccaggaacccctgatgatctgatcatctcaaatctcacctccaaatttggcagccagccactcagtcctttctgtgtggtgtggtagcactgtgacaggaattaagctttcttaactttcttttttctctccccccctgcacacttttttgttttgagacagggtcttgctctgtcacccaggctggagtacagtgtggtgctatcttcgctcactgcaacctctgtctcctggggttcaagagattctgtctcagcctcccaaagtagttgggactgcaggcgtgcaccaccacacctggctaatttttaatttttttttttttttttttttttttttaagaaatagggttttgaggccaggtgcagtggctcatgcctgtaatcccagcactttgggaggccgaggtgggcagattgcctgaggtcaggagttcgagaccagcctggccaacatggcgaaaccccatctctactaaaaatatgaaaatcagctgggcatggtggtaggcgcctgtaatcccagctacttgggagtctgagccaggagaatcgcttgaacccatgagacggaggttgcggtgagctgagatcgcgccattgcactccagcctgggtgacagagcgaaactcgtcaaaaaaaaaaaaaaaaaaaggaaagaaaagaaaagaaatagggttttgccatgttgtccaggctggtcttgcactcctgggctcaagtgattctcccacctcagcctcccaaagtgctgggattacaagtgtgagccacccaagcctgctgagtttttttttttttaacttttaatgttgtacgtgctggctgggcagctggagttgggtagagggcggttagggttctaggctggtgtggatgctctgagaaagctatacttgatgcgaaaatattgaaatccttctctgctagctggcaaagggccgctgctctcactcatcagaggggccccagcctccccaccctccagtaattctggggcacaggagaaagcctctgggaccttgttgcccaagtatcttctcattggtgggtgcccgagcggaacaggttgttcagatgttcaaatacttctgcatgtgtcagtaaagagctgccactctggctgggtacagtggctcacacctgcaatcccagcactttaggaggttgcggtgggaggatggcttgagctcaggagttcgagaccagcctgggcaacatagcaagacttggtctctacaaaaaatttttaaaactagttgggcgtagtggcgcacacctatagtcccagcgaattgcgggggctgaggagggaggatcacaaaaatttagctgggtgggtggtgtgtgcctgtggtcccagctacttgggagactgaggccagaggatcgtttgaggctgggagttggaagctgcagtgagctatgttggcaccactgcactctagcctaagtgacagagcgagaccctgtcaaaaaaaaacaaaacaaaacaaaacaaaaatggctgggcgcggtggctcatgcctgtaatcccagcattgggaggctgaggcgggcgaatcatgaggtcaggagttcgagaccagcctggccaacatggtgaaacgctgtctctattaaaattacaaaaattagctgggcatggtggcgcatgcctgtaatcccagctacttgggaggctgaggcaggagaatcgcttgaaaccggaaggcggacgttgcagtgagccgagattgtgccatttgcactccagcctgggcaacaagagcaagactctgtctcaaaacaaacaacagtaaaaaaaccccacaacagctacccccgagcttctccagtgtcctgataccaccttgcagcctgagggcctcagggatggcgccgcttgaattctgggtgcccctgtcccccaccacaggagctgctgatggcgcacgacttcaccaagtttcactcgctgaagccgaagctgctagaggcactggacgagatgctgacgcacgacatcgccaagctcatgcccctgctgcggcaggaggagctggagagcaccgaggtgggcgtgcaggggggcgcttttgagggcacccacatgggcccgtttgtggagcggggacctgacgaggccatggaggacggcgaggagggctcggacgacgaggccgagtgggtggtgaccaaggacaagtccaaatacgacgagatcttctacaacctggcgcctgccgacggcaagctgagcggctccaaggccaagacctggatggtggggaccaagctccccaactcagtgctggggcgcatctggaagctcagcgatgtggaccgcgacggcatgctggatgatgaggagttcgcgctggccagccacctcatcgaggccaagctggaaggccacgggctgcccgccaacctgccccgtcgcctggtgccaccctccaagcgacgccacaagggctccgccgagtgagccggcccccctcccatggccctgctgtggctccccagctccagtcggctgcacgcacacccctgctccggctcacacacgccctgcctgccctccctgcccagctgtaaggaccgggggtctccctcctcactaccgccagacaccccggtggaagcatttagaggggaccacgggagggacaaggcttctctgtccgcccttcacacctccagcctcacgttcacttaggcacatcacacacacactggcacacgcaggcatccatccatccgtcattcattcaaatatttattgagcacctactatgtgcccagccctgttctaggcactgggcattaccatagagaacaaaatagacaaatacatctgccctcatggaaggtgacgttcccaggagagggcacctacacagtcacgcaaacacacactaattcctggcagggcccccagcccctcccctggctgagcagccctgtggctgaaatgactagcagataaacagacccccttctgctccgcttcctcctgcccagccaggcaacaccctcaaccggctccatcacatcctcaggtctcgggaccatggggggctcagaggggagacacacctactgcttcctcagatgggcccctccgcagccccttcccttgctcggggaaagcccccaattctgcccacacccatttatttccttccttccttccttcttttctttccttccttccttcttttttgtttttgcccccaattctgcccatacccatttctttctttccttccttccttcttttttgtttttgcccccagttctgtccacaccccttccctttcctgtcctgtcctttctttcttttttgatagaatcttgctctgtcgcccaggctggagtgcagtggtgagatctcagctcactgcaacctccacctcctgggttgaagtgattctcgtgcctcagcctcctgagtagctgggactgcaggcacgcgccaccacgcccagctaatttttgtatttgagtagagacggggtttcaccatgttggccaggctggtctcgaactccgcatctcaggtgatctgctcgccttggcctcccaaagtgatgggattacaggcatgagccaccgtgcccggcttcacacccatttctttaaaaaggatcccgtagcaggcagaaaagccccttccatcctgctcctctgatactgtgcccccttggagatatttccgtcctccacccacgtgtctgtggctggaactgcccagcctgctcctggccccctggaagcctccccacagctggtaatctggacttaaggattgctgggccaccgcctctctgcctaccaccattccatatttaagtggagcccctacgtagaaaggccccggggctttattttagtctccttttcagggatgtcgtgggcgggggagggggttcttggtgctacagccctctccccacccctaaagggacgccgacgctgtttgctgccttcaccacatattagtgcttgaccctggcaggggaccccatggaaaagatggggaagagcaaaatacatggagacgacgcaccctccaggatgctcgctgggattcccacgcccaccactgtcccccaccccatggctgggaggggcctctgaacggaacagtgtccccacagagcgaataaagccaaggcttcttcccatgtggcagtgaggctggcttgggacagggatcgcccgccctcccccagggaaagagagacctgggcaggatttggggtggggggaggcccccttccgtgctctcaggggcggggtggagtccgtgactcaatgcagcgaggcctggtgactcaggcctgggctgggggccagaacggcatattttccgaggaaaagtgactctggggccctccccccgggacatcccttcctcccacctcccgcggcgggggcctgggaaccaagccctggggcgcgcgcggggtgtgtgtgtgtgtgtgtgtgtgtgtgtgtgtgtgtgtgtattcgggcacgaagtgctctcccagctcccgccctgcccggcaacgtgcccttgcacaacctgggtacataactcccgacgcgtaacaccaggaacacgctggtttctggttggggaagtggtgaccttgcccacacgggctgccaggagtgtgcgcgcgctcacgcaccggggactcttggccagagctgggcagcgcaccgtgcgcgccgagtcccgcgcactcacatccaggccacacccacggcgtcccgggacacgctggccgcgcactcatcccgcccacgcgggcccagtttcgcggctcgcggcgccccctggcggacgctcagaaaacagataggctgtggtcgccaaaatccctgcccaggtgattcggcgctcaggtctcggggctgcgatccagggcctgtcacctttagggcctgtcacctttccaacgctctgcgcaaggatccagttgaatttcgctgtgtgaccatgcgtgtgtcgcctgccctctctgtgcctttttcctttatgagtccagagtggcttttatgaggcctggattcctttgatttgattgttttgtttttgagacagggtcttgctctgtcacccaggctggagtgcaatggtgcaatcacggctcactgcaccctccaactcctgggctcaagcgatcctcccacctcagcctcccgagtacctgggactacaggcgcacaccatcacgcctggctaatttttaaatttttggcagacacaggatctcactatgttgcccaggctggtcttgaattcctgggctcaagcgatcctcctgcatcggcctcccaaagtgctgggattagaggcgtgaatcaccacgccctgccatggatccctttgaatggctgccagggcccaagagcctctgagcttccttccttatttgtaaatgacaaagatgagttgattctaagatgaagcctcagagggcaaggcagtaacaatagctaacactcagatgccagacgcagccttaagcgctttacatatgtttaatcttctgcatgacttatgacgcagatgtactgttatcatctttattttacagatgaggaaactgaggcacagtgaagtagcccgctcaagatgaatgattctgagtctgcacttctagggtcctaaaagtgtatgtttctaacattcctctaatgttctgtgcttccaactttgatattccgaaagttacttgatttctaagatcctaggattggaacatttgagaggacaaaacttctgagattggaatgtgtgttgtgcggaatctgccactgacggttctgactttctaagaaaacgagattaaaaaataatcaggccgagcatggtggctcacatctgtaatcctagcattttcggaggctgaggagggagaatcacttgagcccaggggttcaagaccagcctggacaacatagtgagacctttgtctcttaaaaaaaaacacacacacatcagtttggaccgggagtggtggtgtgagcctgtaatcccagcgctttgggaggcctaggaaggaggatcacttgaaaccagatgtttgagaccagcctgggcaacatggggaggctccatttctacaaaaaataaaaataaaaaattagccaggtgcggatgcacccttctgtggtcgcagctactcgggaggctgaggtaggagaatccctgagcttaggagttggaggctgcagtgagccattacccttccactgcactccagcctgggggcaacaaagtgagaccttatctattaaagaaaaaaatcagtttgagcaaagaccccaggcggccgggaaaggtgttcgcttaagggcgaaagctaagaacctgcaaccttcccgtctctttcctaccacccgccgccgttaggaatcttcagatcccgctgtaaagaatggaggaaggaggagccatttatcctttaccaagatggcagcctcctggcaactccagtcactttataaatatggctgccacaggaagtacgtcacggaagagggtgggaaatctgcgcgcgcacgctgcaaaggggctttttgggacgccagtggctgagttcttcctttgacaagatggcggcaggaggcagtggcgttggtgggaagcgcagctcgaaaagcgatgccgattctggtttcctggggctgcggcccacttcggtggacccagcgctgaggcggcggcggcgaggcccaagaaataagaagcggggctggcggcggcttgctcaggagccgctggggctggaggttgaccagttcctggaagacgtgcggctacaggagcgcacgagcgggtacgttgggcgggacttccgggaggtgggacggttcctgcgcccaggtgcaaggccaggcgtgcttgcgtggactcgtcgggggtcgggggtcgggggtcgggggttgggggctcctgtcccggggaccgccgaggaaatggagagcatgggcaggggactcagcatgggaagctggagagcttgatagagttaccagatttagcagataaatatacaggacgctcaattaaatttggattttaggtaaacaatgaataatttttagcataaatacgttccatgcatccaccttagcttgctgttttctaaatatgtgtgtgtgtgtatgtatatatgtgtgtgtatatatatgtgtatatgtgtgtatatatatatgtgtatatgtgtgtgtgtatatatatgtatatatatatgtttttcagacggagtctcgctctatcgcccaggctggagtaggcgcgatctcagctcaccgcaacctccgcctcccaggctcaagcgattctcctgcctcagctccttagtagctgggattacaggcgggcgccaccacgctcggctatttttcttttcttttcttttttcttttttttttgagacggagtctttctctgtagtccaggctggagtgcaatggcacgatctcggctcactgcaacctctgcctcctgggttcaagtgattctcctgcttcagcctcccaagtagctgggattacaggcatgcaccaccacgtccggctaatttttgtatttttagtagagacagggttttgccatgttacaggccaggctggtcttgaactcctgaccttaggtgatccacccgccccggccccctaaggtgctaagattacaggtgtgagccaccacacccagcctaatttttgtatttttagtaaaggcagggtttcaccatgttggccaggctgctcttgaactcctgacctcaggtgagccacccgcctgggcctcccaaagtgctgggattacaggcgtgagccactgcgcctggcagtccttcctaaatactaagttctgtaaactgctgggcgaagccttagcctggaagagtccggtggcgggacttgactaagcggaagatgaaggctggacctgccaggttaaatctctttcctctccaacatctctggctgatgttctgcatttctgtcccccagtggcttgttgtcagaggccccaaatgaaaaactcttcttcgtggacactggctccaaggaaaaaggtgaggagaggcttttgtggtgtggaatggcggttattcattgttagtcagcttacggtagcctctgagatctgtgttaatgatgtggcttggaaggcaaatatctgcggaaacaggtcaaccttaatataaacaaggggacctcaaatgggcagaaagcaagctggagacgaacttagagaaggcaggtttttcttttgagatgtcagtgatctccatgcacagataagctgctgggagtctgccttgatgaataagttagaaacacattaaaggatctctttttagcttgcagaaaagcaagtcaaggacctgcttaactcagtcctgccggttgcggtgagtcacgcctgtattcccagtactttgggaggctcaggcaggcagatcacctgaggtcaggagttcgagaccagcctggccaagatggtgaaaccccgtctctgctaaaaatacaaaaattagccagttgtggtggcgggcacctgtaatcccagctacttgggaggctgaggcaggagaatcacttgaacctgggaggtggaggttgcagtgagccgagatcgcgccgctgaactccagcctgggattactattatttttttgagacagtgttgcgctgtcatccaggctggagtacagtggtgtgatctcagttcaagcgattctcctgcctcagcctcccaagtagctgggactgcaggctgcaccatcaagcctggctaatttcttttcttttctctctctctttttttttttttttttttttttttgagatggagtttcaagcccaggctggagtgcaatggcgtgatctcagctcaccgcaacctccacctcccaggttcaagcgattctcctgcctcagcctcctgagtagctggggttacaggcatgtgccaccatgcccggctaattttgtatttttagtagagatggggtttctctatgttggtcaggctggtctcgaactcctgacctcaggtgatccgcccgcctcggcctcccaaagtgctgggattacaggcatgagccaccacgcctggtcaagcctggctaatttctgtatttttagtagagatgggtcttcatcatgtcagctaggctggtctcaaactcctgacctcaggtgatccacccgccttggcctcccaaagtgctggggttataggcgtgagccgctgcgcctggccaagatgagctttaataggaataagaggacttgctttagtgagcgggtaacacacgtcttaacttgcttgccttaagttgctagaatgtagggtggggatctgctgaaacaagatgaggcgtgagggagggattgctctggtgagtaatagtgtttacttcaatatgtagaaaaacaaactaagaacagatgatctgctctaatgaacagcctggaagcaagcgaaggggtctgctttaatgagcaagagagtgagcttgtgtgagatcagtcaaagggtatgttttaatgaaaatgagcggacctggttcagtgaccagatagagtggaaggagctgccctgaggtacaggagacttccaataggcaggtaaaaagtggttattagagtctgggtgcagtggcctacacctgtaagcccagcgctttgggaggccgaggtggggcggatcacttgaggtcaggggttggagaccagcctgggcagcatggcgaaaccccgtctctactaaaaatacaaaaactagccggacgtcatggtacacgcatgtaatcccagctactgagaagcgcttgaacccgggaggcagaggttgcagtgagccaagatcataccactgcactccagcctgggcgacagagcaagactctgtctcaagctgggcgtggtggctcacgcctgtaatcccagcactttgggaggctgatgcgggtggatcacctgaggtcgggagtttgagaccagcctgaccaacatggagaaaccccgtctttactaagagtacaaaattagccgagcgtggtggcgcatgcctgtaattccagctactcaggaggctgaggcaggattgttgcttgaacctgggaggcagaggttgcagtgagccaagagcgcatcattgcactccgctccagcctgggttacaagactctgtctcaaaaaaaaaaaaaagtggggggttattagagaagtcagccttgaccgaagtgagttgatctggtgtgtgagtgtaaagggtaagtcagtgacctgcccgtaatgaacagatgggaaagtagttaccggcgtgctttggcgagtgggaagcctctttggggggcaggaaagaggcagtttatgggttccactttagtaaggaaacacggacaaagatcatagtggttgtgagcagtcaaccaggtcagcccctgtgctttgtgggccttaaatgattacatcttcataacggcctagtgagggaggtatccacatcctcattttgggggcacggaggagctaagcctcttgtgtgaggtcccacagtccatgcaagggtgttattccattctagagtgttttgctgtagagttactgcttttaactgttaggcttttgaagtaaaaaccacaggtatctttgtgggaggaaaaagacagtaaaaaccagagaactagaagttatgctgagaagtggccatcctgggtcccaagtccacttctgtggccctccctgggcttcagtgtcaactgatgacttgctttcttccttttttttttccccctgagatgagatctcactatgttgctcaggctggcatcaaactcctgggctcaagcgatcctcccacctcagcctcccagagtgctgggattacaggcgtgagccaccatgcagggaagaggttccctgtttgtctggaagaccctcctatgtggctgtgggcgtgactcttcgtgtccccagcatggggcctgcctcctgctggcccagcacttggttgtggagggtcagagcttgggcaccttgggccccatccttaggggcctctacctccaggtaggagcctggggacctccaagtctcctggggtgacttgggattcaggtctgatggctcccatggaggtgaatagggtgggtggtctttggcagtgggtagggctgaggccttgacttgttctctttcccattcttagggctgacaaagaagagaaccaaagtccagaagaagtcactgcttctcaagaaaccccttcgggttgacctcatcctcgagaacacatccaaagtccctgcccccaaagagtgagtgtcccagcatccctgggcccttctttcccaccagactctggtcctaaagggtttccggggctgggggctggtaggtgagggtcatttgaagggtagggcaggctcaggtttgggcttcggagtgcagattagagggagggagtctgggtgccctggtgctgggccgaggcaggtgaggaggggcctggacccagctgggggcttcggggttggagaggaggggctgagtgggaggcgtgttcaggaggcacatcaggtgggtcttggggcatgagcgggtgagagggtggacagctggccttcccctgagatggggatgtggaggagtgggatttcgggtgatgctgaggttggttttgacgtggtggtgtgaggtgcctggggtatgtccaggacggggctgttgcttcgttgagtctggggctcagaggggaggcctaggctggagacagacgtggggagaggagttctctgaagagggggcggagtgccaccttttggagagggggtgctgaagctgccttaatggtggaggaagcccgacggggaggaggccctgctgccgttcaggctgccacctcacctgctgcacttgtgccccctctccccgaccagcgtcctcgcccaccaggtccccaacgccaagaagctcaggcggaaggagcagctatgggagaagctggccaagcagggcgagctgccccgggaggtgcgcagggcccaggcccggctcctcaacccttctgcaacaagggccaagcccgggccccaggacaccgtagagcggcccttctacgacctctgggcctcagacagtgagtgatcctgctgtcacctatgaatggggacaggacggccatgtgcagtttgtgtgtgttgtgcactgcacgagagtacagtgtgaaagggagtgctttgtgggtgctttggtgacctcccagcagagtcgtgcgtcctgaaggggcggccgtttcccactcgtgcttttcctttcctgagttgtgaggcttcaggaaaggaagccttcagctttggtctcttccactttctgaacccgtccagacacagttttgtcctggtgatcaaggcccttggggtctagaatcagtccttcccttgcctgagcttcagggtcacctttttgaaatgtggagggattgggggggagcctttggtgcctcttccatgctgggactgtcccagcagctcccctcgctgtatccacagaccccctggacaggccgttggttggccaggatgagtttttcctggagcagaccaagaagaaaggagtgaaggtgagatgtgtgggaagggcatcctgggtgatgggagggtgaggagggccgggagctgctctgtgttcctgcagtagagtctgtctcagagcccttccatcccagtggccgagaactctgtgctggagccaggtggctgggattcctgtcccagctccagtgctgactgatcctgggaaggtggtctcacctttctgcaacctatatcttcctctaaaatgcagatgagggccgggcatggtggctcacgcctgtaatcccagcacttcgggaggccgagacaggtggatcacctgaggtcgggagtttgagaccagcctgaccaacgtggtgaaaccctgtctctactaaaaatacaaaaaaaaaattagctgggcttggtggcacgtgcctgtagtcccagctattagggaggctgaggcaggagaatcgcttggaccagggaggtggaggtggcagtgagccgagatcatgccactgcactccagcctgggcaacaagagcgaaactctgtctcaaaaaaaaaaataaaataaaatacagatgaaattgtacttagatcatgggtcggtggggagaatgtaaagaggtagcacatgagaaggtggagcccgtgctggcaagtggcagaagtgtcacgggtttgagtttggatttgcagcctccttcttgagctgctggaccccaagtgttagagcccaggtgcttacaatctccggggctcagcctcgtgggtagcagaggataggctgctatcctttttctgagatggagtcttgctctggagtcacctgaatgccccttgagctcttcccacacccaaccactggcaaggcctggagcatctgccccatggctgtgtcctgggtcacccgcagccccaacgcacggccttaccctgcctcggccttttctccacagcggccagcacgcctgcacaccaagccgtcccaggcacccgccgtggaggtggcgcctgccggagcttcctacaatccatcctttgaagaccaccaggtacactgccccgtccaggcctccctcctcagtgggctctgcctcttggtcaggccttcactagcttcctccctgtgctgggaactccaatgacccagacagccctgggcctgtccgcaacggggctcacggtccagtgcaagagacctgttcccagacagtgatgggcagagtggttggggctgggagcccagacggggcacctggcccagcctggggggtcaggaagggctcccgggaggaggggtcgcctgagccgaggcagaggctgagggaggggtttgcagtgggaggaggggagtgggttttccaggtggtgggaacagcactgcaaaggcacagagttgagagagaccgtggcgccttccaggaagcctgtggggcagagatgaaaaaggctgtggtgacacggtggcacactggcagccaagtgacagttatatatgggcgaggctagctcagcgatgggaaagtctagctggagccactgtgcatttagcgggcatctgttgagcacagatgctgtggacaaaggggacaaaaacccctcccttggccgggtgcggtgcctcacacctgtaatcccagcactttgggaggctgaggcgggcagatcattggaggtcaggagttggagaccagcctgaccaacatggtgaaaccctgtctctactaaatacagaaaattagcagggcatggcagcacgcatctgtggtcccaactgcttgggaggctgaggtgggaggattgcttgagcccaggaggtccaggctgcagtgagctatgatcgcaccacggcactgcagcctgtgtaacagagcgagactcaaaaaacaagcacaaccctccctcaaggaacagcccttctcatggggtcacgtgactggagagatgctgagatgtttgcggtagatgcaggaccgcttgtccgaatcgttttcagcattcataagaaggagatagctagccaggaacagaggcagcttcctcatctggtagagaaaagtgtctgcggaaaaaagcaacagtgtgctcatggttgaaagcgtgagggtgccgctcactgccatctgttcctggaccagatgtgggagggggcgtggagatcagacattcacttttagatttgtacagaactacttcgtagagataaaattcacttaaccatacggtcagcctagttagagtatgtgattcagtggcttttagtgaccattgtgtaaccatccccgcagtcaattttagaacattttcactgtccgtaaaggaaacctcacacatgtcagccatcacccccgcaattccctgtctcgtgtggtcttgggctgccaggcttcctgtctcagggaccagcccaccctgaccaattcacatagatgaaactgtgggccgggcatggtggctcacacctgtaatcccagcactttgggaggccgaggtaggtggaccacctgaggtcaggagttcaagaccagcctgaccaacatggagaaaccccatctctactaaagttacagaattagccgggtatggtggcacatgcctgtaatagtagctactcgggaggctgaggcaggagaatcgcttgaacccaggaggcgggggttgtggtgagctgagatcacaccattgcactccagtctgggcaacaagacagaaactctatctcaaaaaaaaaatgtgaagcgtgcaggtcagactgccttcacagacgtgcagagcaggtgtgagggcgagggtttgaggtgccctctggctctgtgcagggtgggtgtgctggtagacggggtgtggggaggaaagcctgggccggggcgggatccacgggcactggatgagggacagatgggaggtaagagggtctagtctcagtgtcccaggaggggttcagggacccatcctcactcccgcccctcagaccctgctctcagcggcccacgaggtggagttgcagcggcagaaggaggcggagaagctggagcggcagctggccctgcccgccacggagcaggccgccacccaggtgagccccgcacctgcccactccctcccctccccgggcctcctacccacccctgacactgcaccccgcctccccaggagtccacattccaggagctgtgcgaggggctgctggaggagtcggatggtgagggggagccaggccagggcgaggggccggaggctggggatgccgaggtctgtcccacgcccgcccgcctggccaccacagagaagaagacggagcagcagcggcggcgggagaaggctgtgcacaggctggtgagcgcctgggccagcggggcctgcctctgatgcctcgcccccttccttccttcctcccaccatgggctgccctgggtgctgcgggcagcctgcacaccccaagccccgcatgtggcctgtggtttgggctgtttgggatcctcacagctgagactcatttcccagcctcttccaggcagggctcgggctggggtgggacagggtccctggcgcttctgtttgaggggcggggtggggggaggtttctgcaccgcagaccaggggagatggatgacaaaaggggcttcagcaaacagctgctgggaaggcactggaggggccgctgatgtgacggggttaggaagggcctccggggacaggcaggtttgtgcagggaaggctccctgtgtagagagaaggtctccctgtgtgggcagcaccggcctgagccctgaccctcccccgtctccacagcgggtacagcaggccgcgttgcgggccgcccggctccggcaccaggagctgttccggctgcgcgggatcaaggcccaggtggccctgaggctggcggagctggcgcggcggcagaggcggcggcaggcgcggcgggaggctgaggctgacaagccccgaaggctggggcggctcaagtgagaaccaggccgggggttctgggagaggctggggagggggccgggtcccaggtcctgacaccttcctgcctttgttcaggaactgcccaccccccccatcgggagaccacctcttcccccacaaaaccccacattctcagaggccccttcttctccaggagggggctttggactgggtgtcctgggccccgcgggggtgatatttctgaacacccgccctgttctgcaggtaccaggcacctgacatcgacgtgcagctgagctcggagctgacagactcgctcaggaccctgaaggtgctcactgtgtcctgccgtggagccccgtgcccagtgatgacaccatccttgctccccgtgccccccaggggctatgggcgacaccatggctgcccctgggctgggccagtggggccaatgcccaggggctgagggcacgggatgctgggatgagatcccagggtgaggggccaggctaaggtttgagtccgggaccctaagaaggcctttccttccagctggtccctgttgcagtcccggtcacctttaggactagagggaccttcctgaagctcagaaccaaccctgtccctcccctgctcggaacctgctgtggctccccagtgcccctgaggaagcccagctcctctgtcagccacacgcctgggccgacccggccgtggggctccagccagttgtgctcatgagcggactgtgccttctccctctgatccagcctttgccctcgctgtccccttttctgtgtcgtcaccagcccacttcccgtgactcctctaagcccagcttagagatggccataggttggtggctgtcatcccaacactgagccccagcagctgagggccaggctgagtccctggtgcccacaggctgccctggggggagactgcatggggctgagccctgccaggaccccgaggagaggtccaggcccttgggcttctgccaggccctgctgaggcctccctctctgtcctgtagcccgagggcaacatccttcgagaccggttcaagagcttccagaggaggaatatgatcgagcctcgagagagagccaagtaaggggcggccggggctgctgtggggcgagggcatctgggattggccccgggcactgattgctccattgtccctgctccaggttcaaacgcaagtacaaggtgaagctggtggagaagcgggcgttccgtgagatccagtgagtccacccggcttcggcgcaaggaagggagcccttctcccaccccgtggtgcccaccgagtcccagggccccttccagagtgtggctagtggctgagccacacccccttggccatgcccagaagaggccctgaaaccagagcggggttgggagggtccccaaagggaaactgaaaggcagggggtgtcaggtcggcagggggtatggggcaccctctcacccaccctcagctcctttcctctgtccccaggttgtagctgccatcagatgccggagactcgcccttcaataaaaaatctcttctagctgatcagtgggctccacgtgtggcttgtgtgcctcctgcgggcggctgctcccgggtgcagactctgcgtgtccccccgtggcgcacaagcatgtaggtgccagaactcaccgccagagcctggtgagggcctagggtgtgtctgaaggggtcatcagccgactggatcgtggtctgtccaatagctgtgaagctggcagcccttccaagcctgggcagatcctaaaaagacagcaggcagagggcgcagggcttatggcctggccggagttgggaggtgaagcagagggcacagggcttatggcctggccggaggtgggaggtgaagcagagggcgcggggcttatggcctgtctggaggtgggaggtgaagcagaggtgaggaggaggttcccccactggattccgacttggagaatagcccagttccttctgctgcgggtgacgtagcagctcttgccacactgatagaaggagtggtggcagctgacctctgccgatagaacacctgctatcgggtttaagcaggtggattcactcactgaactcacagcggcctaaccaatgagggctgtacttattcccattttaaaggtgaggaaatagggctgggcacagtggttcactcctgtaatcccatcactttgggaggctgaggcgggcagatcacttgagcccaggagtttgagaccagcctgggcaacatagccataccctatctctaccaaaaattcgccagttatggtgggatgcagctatggtcgcagctactggggaggctgaggtgggaggatcacctgagcttgggaggtggaagctgcagtgagccatgatcacgccattgcactgcagcctgggtgacagagggagacctgtaccaaaaacttaagtaacaaaggtgaggaaacagaggcacataaaatgaggtaattttcctcccttctgtgcctattttgaaaacgtttttaaaatctttacaagaaacgaaaaacttattctcactgtaaatcattgtcaaaacgtgtctgtcactgttgacctttgccctccagtcacatccacgcccctgttctggagctgcctgtcaagcagtcactgcagtgtggtttgagtgattatgctccctgtgtgattctattaaattacataatcgattagccaggcatggtggtgtgcacctgtagtcccagctcctggggaggctgaggtaggagaatcgcttgaacctgggaggtggaggctacagtgagctgagattgcgccactgcagtctctcctggatgacaaagaggaccctgtctcgacccccccaccccccaaaaaactaacgtaaatttcacgcatgtacttgtgaggatagaattggttttttttttttttggtgtcttaggatcacactgtgcgtgattctgcagcttgctgtcagtgcatcttggaggtaattctgtgtctgtacagaactgcttccttctgttttgtggctgtgtggaatcccattacgagggtgtgccttgtgtttcttaaccaggccagtgtggctcctcctaatgaaaccgaaacaatgtctttgtccacgtgcctttttacttgtgtctgtagttaagtacctggaagtgaatcttggctgaaggatacatgtgtctgtaacaggtcatttgataggttcaacccaattggtctccaaaggggctgtgctgatttttactctctggtagcataggaggagcctgcctgttgccgtgtagctttgctacggtgcgattccattatttttatttgattgtgtctggttaccagtgaggttgaacttttttttttttttgaggtagggttccccaggtgggagtgcaatggtgcaatcccagcttcttggctcactgcagccttgacctcctgggctcaagtgatcctcccacctccgtcctcccaagtagctgggattacaggcacatgccaccatgcctggctactttagtatttttattgaagatggggatttgccatgctgcccaggctggcctcaaactcctgacctcaagcgatccacccaccttggcttcccaaagtgctgggactacaggcatgagccactgtacctgtcttaaacatctccttatatgattgctgaccattcattcacattcctcttctgtgttggtacaaaccttttgaccatttttctcctgtgctgtttgtcattttcttgtttatttgtagtagctctttatttattgtggacccacagtctgtcatacacgtcgcaaacatttcccctaggctgcttttgacttttgactttgtatgtggtgtcttttgtcaggaaggaagggtgttacgttttctgttggtctttctccgttttatactatggcctttgggaaagcttctctaggacaaaatgtttataaaaatagagcaggcagtttataaaagaaatgagtgaggctgggcatggtggctcatgcctgtaatcccagcactttgggaggctgaggcgggtggatcacctgaggtcaggagttcaagaccagtctgaccaacatggagaaaccccgtctctactaaaagtactaaaaaattagccgggtgtggtggcgtgtgctggtagtcccagctacttggggggctgaggcaggagaattgtttgaacccgggaggtggaggttgcagtcagccgagatagtgccactgtactccagcctgggcgacagagtgagactccatctcaaaaaataataaaatataatataaataaataaataaataaaatagaagggagagacttacgtcagaacttcccacctccccaccacatgccacagaacaaggctttaaggagctatttctgctgttcttccccctcccatattaaataaaaaggtgtgttctgcaggtaggaaaacagctgtgtgtgtgtgtgttgggggcggcggggggtggatgtgtggacgatagagcagtagggagaggtaaaaatgaggccgggcatagtggctcacacttgtaatcccagcactttgggaggtggaggtgggtggatcacctgaggtcaggagttcgagaccagcctggccaacatggcgaaactccatctctcctaaaaaatataaaaattagctgggtatggtggcacgcacctatagtcccagctacttgggaggctgaggcaggagaatcacttgaacctgggaggcggaggttgcagtgagctgagaccgcaccactgcactccagcctgggcaacaagagtgaaactccatctcaggaaaaaaagaaaaaaaaaaacaccatctatcaaggaggccagcctctgacccagtgactctgccaggggtgactgaaggaaactgctggaaatggggaggaagctcttaatgcccggacacggcgattggagcgtcgggcacattcctggatacccaggggtgagggtggtcacagccactcaaggacaaactctgtggcctggacacttagtgtcctcaggaagtccttggtatttaattgcctgggaaaatgtgtctgtttccgtgtgtgaaatggggggtccacagcaaaggggtttgtgggtgtttgcacagaaatgacatttcacatccgaattttatgtcagaagcctaaaagtacagaattcagctgggcgcagtggctcacgcctgtaatcttgtcactttgggaggcccaggcaggaggattgcttgaggccaggaattggagaccaccctgggcaacacagcgatactccatctctagaaaaacattttttaggccggtgcagtggcacttgtaatcctagcactttaggaggttgaggtgggtggattgcttgagtccaggagttcaagaccagcctgggcaccatggcaaaatcccactggtttctacaaaagatggaaaaaattagccaggtatggtggtgtgtgccatgtagtcccagctactcaggtggctgaggtgggatgatcagctgagctttggaggttgaggttgcagggagccaaaatctactgcctttcagcctgggtgacacagtgagaccctgtctcaaaaaaaaaaaagttttaaattatttagtcatggtgttgtgctcctgtagtccttgctactcgggaggctgaggctggagcccaggaggtggaggctgcagcatagtataatgatgccactgtgctccatcctgggtgacagcgagactaaaacaaaatacagaactctggctaacaatttacaagccgaatttcactaatgtctgcagtttcctttgaaaaatgtaaaacaggcctggcgcggtggctcatgcctgtaatcccagcactttgggaggcaggcggatcacctgagggtcaggagtttgagaccagcctggccaacatggtgaaaccccatctctactaaaaatagcaaaagttagctgggtgtagtggcagggcgtctgtaatcccggctaggctacttgggaggctgaggcaggagaattacttgaaccccggaggcggaggttgcagtgagctgagatcacgccattatactccagcctgggcaacaagagtgaaactctgtctcaaaaaaagaaaaagaaaaaaaaaacgtaaaacaaggtggattaatgaacagatgccccataaaacaaaagcactgaaatgttaagggcagaatctaggtggtggggtatgggggtatgcacagaaaaattcccttgactttaactgaaagtgtcctaatagggaaatggcacattggggtttcggggccatgtaatggcacaggtttctatcatggccctgcacctgcttttgagtctgtaacttggtattatttttcctaaagcgggtcctccagattataaaagcctcaggcatcagccaggtacagtgactcacgcctgtaatcccagcattttgggaggctgaggtgggtggctcacctgaggtcaggaattcgagaccagcctggacaacatggtgaaaccccatctctactaaaaacacaaaaattacccaggcgtggtggcaggtgcctgtaatcccagctactcaggaggctgaggcaggagaatggcttgaacccaggaggcggagattgcagtgagccgagatcataccattgcactccagcctgggcaacagagtgacactccatctcaaaaacaagacaaaacaaaacaaaaagcttgtggcatgggtatgactttgctttttagaaggatggagaccagacgaatgtagtggcttgctcctgtcatcccagcccttcaggaggctgagttgggaggattgcttgaggccaggagtgagaccagcctgggcaacatagcaagaccccatctctaaaagaaaaaaaaaatgagctgggcataatggcatgtgcccatagtctcagctactcaggaggctgaggtgggaggatctcttgagtccaggagtttgaggctgcagtaaacggtgatcgtgc
